(19) United States
(12) Patent Application Publication
(10) Pub. No.: US 2025/0297288 A1
(43) Pub. Date: Sep. 25, 2025

(54) GENOME EDITING OF B CELLS

(71) Applicant: Editas Medicine, Inc., Cambridge, MA (US)

(72) Inventor: John Anthony Zuris, Boston, MA (US)

(21) Appl. No.: 18/863,883

(22) PCT Filed: May 10, 2023
(86) PCT No.: PCT/US2023/021773

§ 371 Date: Nov. 7, 2024

Related U.S. Application Data
(60) Provisional application No. 63/340,222, filed on May 10, 2022.

(51) Int. Cl. C12N 15/90; A61K 35/17; C12N 5/0781; C12N 9/22; C12N 15/11

(52) U.S. Cl. CPC C12N 15/907; A61K 35/17; C12N 5/0635; C12N 9/222; C12N 15/111; C12N 2310/20; C12N 2510/00; C12N 2800/22

(57) ABSTRACT

Strategies, systems, compositions, and methods for efficient production of knock-in cellular clones without reporter genes. An essential gene is targeted using a knock-in cassette that comprises an exogenous coding sequence for a gene product of interest (or “cargo sequence”) in frame with and downstream (3′) of an exogenous coding sequence or partial coding sequence of the essential gene. Undesired targeting events create a non-functional version of the essential gene, in essence a knock-out, which is “rescued” by correct integration of the knock-in cassette, which restores the essential gene coding region so that a functional gene product is produced and positions the cargo sequence in frame with and downstream of the essential gene coding sequence.

### CROSS-REFERENCE TO RELATED APPLICATIONS

[0001] This application claims to the benefit of U.S. Provisional Application No. 63/340,222, filed May 10, 2022, the entirety of which is incorporated herein by reference.

### BACKGROUND

[0002] A problem with targeted integration strategies for the generation of genetically engineered cells is that successful targeted integration events can be rare, especially when using double-stranded DNA (dsDNA) as a template where knock-in efficiencies are often below 5%. There remains a need for methods of selecting genetically engineered cells, such as genetically engineered B cells, that include successful targeted integration events.

### SUMMARY

[0003] The present disclosure provides strategies, systems, compositions, and methods for genetically engineering B cells via targeted integration that do not require external selection markers, such as fluorescent or antibiotic resistance markers, while yielding a high frequency of correctly targeted clones. In general, the strategies, systems, compositions, and methods for genetically engineering B cells via targeted integration provided herein feature a targeted break in an essential gene mediated by a nuclease, and integration of an exogenous knock-in cassette that, if inserted correctly, results in a functional variant of the essential gene and also includes an expression construct harboring a cargo sequence.

[0004] In one aspect, the disclosure features a method of editing the genome of a B cell (e.g., a B cell in a population of B cells), the method comprising contacting the B cell (or the population of B cells) with: (i) a nuclease that causes a break within an endogenous coding sequence of an essential gene in the B cell, wherein the essential gene encodes a gene product that is required for survival and/or proliferation of the B cell, and (ii) a donor template that comprises a knock-in cassette comprising an exogenous coding sequence for a gene product of interest in frame with and downstream (3′) of an exogenous coding sequence or partial coding sequence of the essential gene, wherein the knock-in cassette is integrated into the genome of the B cell by homology-directed repair (HDR) of the break, resulting in a genome-edited B cell that expresses: (a) the gene product of interest, and (b) the gene product encoded by the essential gene that is required for survival and/or proliferation of the B cell, or a functional variant thereof.

[0005] In some embodiments, following the contacting step, at least about 60%, at least about 65%, at least about 70%, at least about 75%, at least about 80%, at least about 85%, at least about 90%, at least about 95%, or more, of the viable B cells of the population of B cells are genome-edited B cells, and/or about 40% or less, about 35% or less, about 30% or less, about 25% or less, about 20% or less, about 15% or less, about 10% or less, or about 5% or less, of the population of B cells lacking an integrated knock-in cassette are viable B cells. In some embodiments, following the contacting step, at least about 80% of the viable B cells of the population of B cells are genome-edited B cells, and about 20% or less of the population of B cells lacking an integrated knock-in cassette are viable B cells. In some embodiments, following the contacting step, at least about 60% of the viable B cells of the population of B cells are genome-edited B cells, and about 40% or less of the population of B cells lacking an integrated knock-in cassette are viable B cells. In some embodiments, following the contacting step, at least about 90% of the viable B cells of the population of B cells are genome-edited B cells, and about 10% or less of the population of B cells lacking an integrated knock-in cassette are viable B cells. In some embodiments, following the contacting step, at least about 95% of the viable B cells of the population of B cells are genome-edited B cells, and about 5% or less of the population of B cells lacking an integrated knock-in cassette are viable B cells.

[0006] In some embodiments, if the knock-in cassette is not integrated into the genome of the B cell by homology-directed repair (HDR) in the correct position or orientation, the B cell no longer expresses the gene product encoded by the essential gene, or a functional variant thereof.

[0007] In some embodiments, the break is a double-strand break.

[0008] In some embodiments, the break is located within the last 2000, 1500, 1000, 750, 500, 400, 300, 200, 100, or 50 base pairs of the endogenous coding sequence of the essential gene. In some embodiments, the break is located within the last exon of the essential gene. In some embodiments, the break is located within the penultimate exon of the essential gene.

[0009] In some embodiments, the nuclease is highly efficient, e.g., capable of editing at least about 60%, at least about 65%, at least about 75%, at least about 80%, at least about 85%, at least about 90%, at least about 95%, or more, of B cells contacted with the nuclease. In some embodiments, the nuclease is capable of introducing indels (insertions or deletions) in at least about 60%, at least about 65%, at least about 75%, at least about 80%, at least about 85%, at least about 90%, at least about 95%, or more, of B cells contacted with the nuclease. In some embodiments, the nuclease is a zinc finger nuclease (ZFN), a transcription activator-like effector nuclease (TALEN) or a meganuclease. In some embodiments, the nuclease is a CRISPR/Cas nuclease and the method further comprises contacting the B cell (or the population of B cells) with a guide molecule for the CRISPR/Cas nuclease. In some embodiments, the nuclease is a Cas9 or a Cas12a nuclease, or a variant thereof (e.g., a nuclease comprising the amino acid sequence of any one of SEQ ID NOs: 58-66). In some embodiments, the nuclease is a CRISPR/Cas nuclease selected from Table 5. In some embodiments, the guide molecule comprises a targeting domain sequence that is complementary to a portion of the endogenous coding sequence of the essential gene. In some embodiments, the guide molecule comprises a targeting domain sequence that differs by no more than 3 nucleotides from a sequence that is complementary to a portion of the endogenous coding sequence of the essential gene. In some embodiments, the guide molecule specifically binds to the portion of the endogenous coding sequence of the essential gene. In some embodiments, the guide molecule does not bind to an endogenous coding sequence of another gene, e.g., a different essential gene. In some embodiments, the guide molecule binds to and mediates CRISPR/Cas cleavage at a location within the essential gene that is necessary for function (e.g., functional gene expression or protein function). In some embodiments, the guide comprises a nucleotide sequence of any one of SEQ ID NOs: 94-157 and 225-1885.

[0010] In some embodiments, the donor template is a donor DNA template, optionally wherein the donor DNA template is double-stranded. In some embodiments, the donor DNA template is a plasmid, optionally wherein the plasmid has not been linearized.

[0011] In some embodiments, the donor template comprises homology arms on either side of the knock-in cassette. In some embodiments, the donor template comprises a 5′ homology arm comprising a sequence homologous to a sequence located 5′ of the break in the genome of the B cell. In some embodiments, the donor template comprises a 3′ homology arm comprising a sequence homologous to a sequence located 3′ of the break in the genome of the B cell. In some embodiments, the donor template comprises a 5′ homology arm comprising a sequence homologous to a sequence located 5′ of the break in the genome of the B cell, and the donor template comprises a 3′ homology arm comprising a sequence homologous to a sequence located 3′ of the break in the genome of the B cell.

[0012] In some embodiments, the knock-in cassette comprises a regulatory element that enables expression of the gene product encoded by the essential gene and the gene product of interest as separate gene products, optionally, wherein at least one of the gene products is a protein and the regulatory element enables expression of that protein separate from the other gene product. In some embodiments, the knock-in cassette comprises an IRES or 2A element located between the exogenous coding sequence or partial coding sequence of the essential gene and the exogenous coding sequence for the gene product of interest. In some embodiments, the 2A element is a T2A element (e.g., EGRGSLLTCGDVEENPGP), a P2A element (e.g., ATNFSLLKQAGDVEENPGP), a E2A element (e.g., QCTNYALLKLAGDVESNPGP), or an F2A element (e.g., VKQTLNFDLLKLAGDVESNPGP). In some embodiments, the knock-in cassette further comprises a sequence encoding a linker peptide upstream of the 2A element. In some embodiments, the linker peptide comprises the amino acid sequence GSG.

[0013] In some embodiments, the knock-in cassette comprises a polyadenylation sequence, and optionally a 3′ UTR sequence, downstream of the exogenous coding sequence for the gene product of interest, and, if a 3′UTR sequence is present, the 3′UTR sequence is positioned 3′ of the exogenous coding sequence and 5′ of the polyadenylation sequence.

[0014] In some embodiments, the exogenous partial coding sequence of the essential gene in the knock-in cassette encodes a C-terminal fragment of a protein encoded by the essential gene. In some embodiments, the C-terminal fragment is less than about 500, 250, 150, 125, 100, 75, 50, 25, 20, 15 or 10 amino acids in length. In some embodiments, the C-terminal fragment includes an amino acid sequence that is encoded by a region of the endogenous coding sequence of the essential gene that spans the break.

[0015] In some embodiments, the exogenous coding sequence or partial coding sequence of the essential gene in the knock-in cassette is less than 100% identical to the corresponding endogenous coding sequence of the essential gene of the B cell, e.g., less than 99%, less than 95%, less than 90%, less than 85%, or less than 80% identical to the corresponding endogenous coding sequence of the essential gene of the B cell. In some embodiments, the exogenous coding sequence or partial coding sequence of the essential gene in the knock-in cassette is 80% to 99% identical to the corresponding endogenous coding sequence of the essential gene of the B cell, e.g., 85% to 95% or 90% to 99% identical to the corresponding endogenous coding sequence of the essential gene of the B cell. In some embodiments, the exogenous coding sequence or partial coding sequence of the essential gene in the knock-in cassette has been codon optimized relative to the corresponding endogenous coding sequence of the essential gene of the B cell to remove a target site of the nuclease, to reduce the likelihood of homologous recombination after integration of the knock-in cassette into the genome of the B cell, or to increase expression of the gene product of the essential gene and/or the gene product of interest after integration of the knock-in cassette into the genome of the B cell.

[0016] In some embodiments, the nuclease is a Cas (e.g., Cas9 or Cas12a), the exogenous coding sequence or partial coding sequence of the essential gene in the knock-in cassette includes at least one PAM site for the Cas, and the at least one PAM site (or all PAM sites) has been codon optimized or saturated with silent and/or missense mutations.

[0017] In some embodiments, the essential gene is GAPDH, TBP, E2F4, G6PD, or KIF11. In some embodiments, the essential gene is a gene selected from Table 3 or Table 4.

[0018] In some embodiments, the donor template does not comprise a reporter gene, e.g., a fluorescent reporter gene or an antibiotic resistance gene.

[0019] In some embodiments, the knock-in cassette is a multi-cistronic (e.g., bi-cistronic) knock-in cassette comprising exogenous coding sequences for two or more gene products of interest. In some embodiments, the knock-in cassette comprises a first exogenous coding sequence for a first gene product of interest, a linker (e.g., T2A, P2A, and/or IRES), and a second exogenous coding sequence for a second gene product of interest. In some embodiments, the genome-edited B cell comprises knock-in cassettes at one or both alleles of the essential gene. In some embodiments, the genome-edited B cell expresses (a) the first and second gene products of interest, and (b) the gene product encoded by the essential gene that is required for survival and/or proliferation of the B cell, or a functional variant thereof. In some embodiments, the genome-edited B cell expresses (a) the first and second gene products of interest from the same allele of an essential gene, and (b) the gene product encoded by the essential gene that is required for survival and/or proliferation of the B cell, or a functional variant thereof. In some embodiments, the genome-edited B cell expresses (a) the first and second gene products of interest from different alleles of the essential gene, and (b) the gene product encoded by the essential gene that is required for survival and/or proliferation of the B cell, or a functional variant thereof.

[0020] In some embodiments, the method comprises contacting the B cell (or the population of B cells) with a first donor template that comprises a first knock-in cassette comprising a first exogenous coding sequence for a first gene product of interest in frame with and downstream (3′) of an exogenous coding sequence or partial coding sequence of the essential gene, and with a second donor template that comprises a second knock-in cassette comprising a second exogenous coding sequence for a second gene product of interest in frame with and downstream (3′) of an exogenous coding sequence or partial coding sequence of the essential gene. In some embodiments, the genome-edited B cell comprises the first knock-in cassette at a first allele of the essential gene and the second knock-in cassette at the second allele of the essential gene. In some embodiments, the genome-edited B cell expresses (a) the first and second gene products of interest, and (b) the gene product encoded by the essential gene that is required for survival and/or proliferation of the B cell, or a functional variant thereof.

[0021] In some embodiments, the method comprises contacting the B cell (or the population of B cells) with a first donor template that comprises a first knock-in cassette comprising a first exogenous coding sequence for a first gene product of interest in frame with and downstream (3′) of an exogenous coding sequence or partial coding sequence of a first essential gene, and with a second donor template that comprises a second knock-in cassette comprising a second exogenous coding sequence for a second gene product of interest in frame with and downstream (3′) of an exogenous coding sequence or partial coding sequence of a second essential gene. In some embodiments, the genome-edited B cell comprises the first knock-in cassette at one or both alleles of the first essential gene and the second knock-in cassette at one or both alleles of the second essential gene. In some embodiments, the genome-edited B cell expresses (a) the first and second gene products of interest, and (b) the gene products encoded by the first and second essential genes required for survival and/or proliferation of the B cell, or a functional variant thereof.

[0022] In another aspect, the disclosure features a genetically modified B cell comprising a genome with an exogenous coding sequence for a gene product of interest in frame with and downstream (3′) of a coding sequence of an essential gene, wherein the essential gene encodes a gene product that is required for survival and/or proliferation of the B cell, and wherein at least part of the coding sequence of the essential gene comprises an exogenous coding sequence.

[0023] In some embodiments, the exogenous coding sequence of the essential gene comprises about 2000, 1500, 1000, 750, 500, 400, 300, 200, 100, or 50 base pairs of the coding sequence of the essential gene.

[0024] In some embodiments, the exogenous coding sequence of the essential gene encodes a C-terminal fragment of a protein encoded by the essential gene. In some embodiments, the C-terminal fragment is less than about 500, 250, 150, 125, 100, 75, 50, 25, 20, 15 or 10 amino acids in length. In some embodiments, the C-terminal fragment includes an amino acid sequence that is encoded by a region of the endogenous coding sequence of the essential gene that spans the break.

[0025] In some embodiments, the exogenous coding sequence of the essential gene is less than 100% identical to the corresponding endogenous coding sequence of the essential gene of the B cell. In some embodiments, the exogenous coding sequence of the essential gene has been codon optimized relative to the corresponding endogenous coding sequence of the essential gene of the B cell to remove a target site of a nuclease, e.g., a Cas. In some embodiments, the nuclease is a Cas (e.g., Cas9 or Cas12a), the exogenous coding sequence of the essential gene includes at least one PAM site for the Cas, and the at least one PAM site (or all PAM sites) has been codon optimized or saturated with silent and/or missense mutations.

[0026] In some embodiments, the essential gene is GAPDH, TBP, E2F4, G6PD, or KIF11.

[0027] In some embodiments the B cell's genome comprises a regulatory element that enables expression of the gene product encoded by the essential gene and the gene product of interest as separate gene products, optionally, wherein at least one of the gene products is a protein and the regulatory element enables expression of that protein separate from the other gene product. In some embodiments, the B cell's genome comprises an IRES or 2A element located between the coding sequence of the essential gene and the exogenous coding sequence for the gene product of interest.

[0028] In some embodiments, the B cell's genome comprises a polyadenylation sequence, and optionally a 3′ UTR sequence, downstream of the exogenous coding sequence for the gene product of interest, and, if a 3′UTR sequence is present, the 3′UTR sequence is positioned 3′ of the exogenous coding sequence and 5′ of the polyadenylation sequence.

[0029] In some embodiments, the B cell's genome does not comprise a reporter gene, e.g., a fluorescent reporter gene or an antibiotic resistance gene.

[0030] In another aspect, the disclosure features an engineered B cell comprising a genomic modification, wherein the genomic modification comprises an insertion of an exogenous knock-in cassette within an endogenous coding sequence of an essential gene in the B cell's genome, wherein the essential gene encodes a gene product that is required for survival and/or proliferation of the B cell, wherein the knock-in cassette comprises an exogenous coding sequence for a gene product of interest in frame with and downstream (3′) of an exogenous coding sequence or partial coding sequence encoding the gene product of the essential gene, or a functional variant thereof, and wherein the B cell expresses the gene product of interest and the gene product encoded by the essential gene that is required for survival and/or proliferation of the B cell, or a functional variant thereof, optionally wherein the gene product of interest and the gene product encoded by the essential gene are expressed from the endogenous promoter of the essential gene.

[0031] In some embodiments, the exogenous coding sequence or partial coding sequence encoding the gene product of the essential gene comprises about 2000, 1500, 1000, 750, 500, 400, 300, 200, 100, or 50 base pairs of the coding sequence of the essential gene.

[0032] In some embodiments, wherein the exogenous coding sequence or partial coding sequence encoding the gene product of the essential gene encodes a C-terminal fragment of a protein encoded by the essential gene. In some embodiments, the C-terminal fragment is less than about 500, 250, 150, 125, 100, 75, 50, 25, 20, 15 or 10 amino acids in length. In some embodiments, the C-terminal fragment includes an amino acid sequence that is encoded by a region of the endogenous coding sequence of the essential gene that spans the break.

[0033] In some embodiments, exogenous coding sequence or partial coding sequence encoding the gene product of the essential gene is less than 100% identical to the corresponding endogenous coding sequence of the essential gene of the B cell. In some embodiments, the exogenous coding sequence or partial coding sequence encoding the gene product of the essential gene has been codon optimized relative to the corresponding endogenous coding sequence of the essential gene of the B cell to remove a target site of a nuclease, e.g., a Cas. In some embodiments, the nuclease is a Cas (e.g., Cas9 or Cas12a), the exogenous coding sequence or partial coding sequence encoding the gene product of the essential gene includes at least one PAM site for the Cas, and the at least one PAM site (or all PAM sites) has been codon optimized or saturated with silent and/or missense mutations.

[0034] In some embodiments, the essential gene is GAPDH, TBP, E2F4, G6PD, or KIF11.

[0035] In some embodiments, the B cell's genome comprises a regulatory element that enables expression of the gene product encoded by the essential gene and the gene product of interest as separate gene products, optionally, wherein at least one of the gene products is a protein and the regulatory element enables expression of that protein separate from the other gene product. In some embodiments, the B cell's genome comprises an IRES or 2A element located between the coding sequence of the essential gene and the exogenous coding sequence for the gene product of interest.

[0036] In some embodiments, the B cell's genome comprises a polyadenylation sequence, and optionally a 3′ UTR sequence, downstream of the exogenous coding sequence for the gene product of interest, and, if a 3′UTR sequence is present, the 3′UTR sequence is positioned 3′ of the exogenous coding sequence and 5′ of the polyadenylation sequence.

[0037] In some embodiments, the B cell's genome does not comprise a reporter gene, e.g., a fluorescent reporter gene or an antibiotic resistance gene.

[0038] In some embodiments, the knock-in cassette is a multi-cistronic (e.g., bi-cistronic) knock-in cassette comprising exogenous coding sequences for two or more gene products of interest. In some embodiments, the knock-in cassette comprises a first exogenous coding sequence for a first gene product of interest, a linker (e.g., T2A, P2A, and/or IRES), and a second exogenous coding sequence for a second gene product of interest. In some embodiments, the genome-edited B cell comprises knock-in cassettes at one or both alleles of the essential gene. In some embodiments, the genome-edited B cell expresses (a) the first and second gene products of interest, and (b) the gene product encoded by the essential gene that is required for survival and/or proliferation of the B cell, or a functional variant thereof.

[0039] In some embodiments, the engineered B cell comprises a first knock-in cassette comprising a first exogenous coding sequence for a first gene product of interest in frame with and downstream (3′) of an exogenous coding sequence or partial coding sequence of the essential gene, and with a second donor template that comprises a second knock-in cassette comprising a second exogenous coding sequence for a second gene product of interest in frame with and downstream (3′) of an exogenous coding sequence or partial coding sequence of the essential gene. In some embodiments, the engineered B cell comprises the first knock-in cassette and the second knock-in cassette at a first allele of the essential gene, optionally wherein the engineered B cell also comprises the first knock-in cassette and the second knock-in cassette at a second allele of the essential gene. In some embodiments, the engineered B cell comprises the first knock-in cassette at a first allele of the essential gene and the second knock-in cassette at the second allele of the essential gene. In some embodiments, the engineered B cell expresses (a) the first and second gene products of interest, and (b) the gene product encoded by the essential gene that is required for survival and/or proliferation of the B cell, or a functional variant thereof.

[0040] In some embodiments, the engineered B cell comprises a first knock-in cassette comprising a first exogenous coding sequence for a first gene product of interest in frame with and downstream (3′) of an exogenous coding sequence or partial coding sequence of a first essential gene, and with a second donor template that comprises a second knock-in cassette comprising a second exogenous coding sequence for a second gene product of interest in frame with and downstream (3′) of an exogenous coding sequence or partial coding sequence of a second essential gene. In some embodiments, the engineered B cell comprises the first knock-in cassette at one or both alleles of the first essential gene and the second knock-in cassette at one or both alleles of the second essential gene. In some embodiments, the genome-edited B cell expresses (a) the first and second gene products of interest, and (b) the gene products encoded by the first and second essential genes required for survival and/or proliferation of the B cell, or a functional variant thereof.

[0041] In another aspect, the disclosure features any of the B cells described herein for use as a medicament and/or for use in the treatment of a disease, disorder or condition, e.g., a disease, disorder or condition described herein, e.g., a cancer, e.g., a cancer described herein.

[0042] In another aspect, the disclosure features a B cell, or a population of B cells, produced by any of the methods described herein, or progeny thereof.

[0043] In another aspect, the disclosure features a system for editing the genome of a B cell (or a B cell in a population of B cells), the system comprising the B cell (or the population of B cells), a nuclease that causes a break within an endogenous coding sequence of an essential gene of the B cell, wherein the essential gene encodes a gene product that is required for survival and/or proliferation of the B cell, and a donor template that comprises a knock-in cassette comprising an exogenous coding sequence for a gene product of interest in frame with and downstream (3′) of an exogenous coding sequence or partial coding sequence of the essential gene.

[0044] In some embodiments, after contacting the population of B cells with the nuclease and the donor template, at least about 60%, at least about 65%, at least about 70%, at least about 75%, at least about 80%, at least about 85%, at least about 90%, at least about 95%, or more, of the viable B cells of the population of B cells are genome-edited B cells, and/or about 40% or less, about 35% or less, about 30% or less, about 25% or less, about 20% or less, about 15% or less, about 10% or less, or about 5% or less, of the population of B cells lacking an integrated knock-in cassette are viable B cells. In some embodiments, after contacting the population of B cells with the nuclease and the donor template, at least about 80% of the viable B cells of the population of B cells are genome-edited B cells, and about 20% or less of the population of B cells lacking an integrated knock-in cassette are viable B cells. In some embodiments, after contacting the population of B cells with the nuclease and the donor template, at least about 60% of the viable B cells of the population of B cells are genome-edited B cells, and about 40% or less of the population of B cells lacking an integrated knock-in cassette are viable B cells. In some embodiments, after contacting the population of B cells with the nuclease and the donor template, at least about 90% of the viable B cells of the population of B cells are genome-edited B cells, and about 10% or less of the population of B cells lacking an integrated knock-in cassette are viable B cells. In some embodiments, after contacting the population of B cells with the nuclease and the donor template, at least about 95% of the viable B cells of the population of B cells are genome-edited B cells, and about 5% or less of the population of B cells lacking an integrated knock-in cassette are viable B cells.

[0045] In some embodiments, after contacting the B cell or population of B cells with the nuclease and the donor template, if the knock-in cassette is not integrated into the genome of the B cell by homology-directed repair (HDR) in the correct position or orientation, the B cell no longer expresses the gene product encoded by the essential gene, or a functional variant thereof.

[0046] In some embodiments, the break is a double-strand break.

[0047] In some embodiments, the break is located within the last 2000, 1500, 1000, 750, 500, 400, 300, 200, 100, or 50 base pairs of the endogenous coding sequence of the essential gene. In some embodiments, the break is located within the last exon of the essential gene.

[0048] In some embodiments, the nuclease is highly efficient, e.g., capable of editing at least about 60%, at least about 65%, at least about 75%, at least about 80%, at least about 85%, at least about 90%, at least about 95%, or more, of B cells contacted with the nuclease. In some embodiments, the nuclease is a zinc finger nuclease (ZFN), a transcription activator-like effector nuclease (TALEN) or a meganuclease. In some embodiments, the nuclease is a CRISPR/Cas nuclease and the method further comprises contacting the B cell (or the population of B cells) with a guide molecule for the CRISPR/Cas nuclease. In some embodiments, the nuclease is a Cas9 or a Cas12a nuclease, or a variant thereof (e.g., a nuclease comprising the amino acid sequence of any one of SEQ ID NOs: 58-66). In some embodiments, the guide molecule comprises a targeting domain sequence that is complementary to a portion of the endogenous coding sequence of the essential gene. In some embodiments, the guide molecule comprises a targeting domain sequence that differs by no more than 3 nucleotides from a sequence that is complementary to a portion of the endogenous coding sequence of the essential gene. In some embodiments, the guide molecule specifically binds to the portion of the endogenous coding sequence of the essential gene. In some embodiments, the guide molecule does not bind to an endogenous coding sequence of another gene, e.g., a different essential gene. In some embodiments, the guide comprises a nucleotide sequence of any one of SEQ ID NOs: 94-157 and 225-1885.

[0049] In some embodiments, the donor template is a donor DNA template, optionally wherein the donor DNA template is double-stranded. In some embodiments, the donor DNA template is a plasmid, optionally wherein the plasmid has not been linearized.

[0050] In some embodiments, the donor template comprises homology arms on either side of the knock-in cassette. In some embodiments, the donor template comprises a 5′ homology arm comprising a sequence homologous to a sequence located 5′ of the break in the genome of the B cell. In some embodiments, the donor template comprises a 3′ homology arm comprising a sequence homologous to a sequence located 3′ of the break in the genome of the B cell. In some embodiments, the donor template comprises a 5′ homology arm comprising a sequence homologous to a sequence located 5′ of the break in the genome of the B cell, and the donor template comprises a 3′ homology arm comprising a sequence homologous to a sequence located 3′ of the break in the genome of the B cell.

[0051] In some embodiments, the knock-in cassette comprises a regulatory element that enables expression of the gene product encoded by the essential gene and the gene product of interest as separate gene products, optionally, wherein at least one of the gene products is a protein and the regulatory element enables expression of that protein separate from the other gene product. In some embodiments, the knock-in cassette comprises an IRES or 2A element located between the exogenous coding sequence or partial coding sequence of the essential gene and the exogenous coding sequence for the gene product of interest. In some embodiments, the 2A element is a T2A element (e.g., EGRGSLLTCGDVEENPGP), a P2A element (e.g., ATNFSLLKQAGDVEENPGP), a E2A element (e.g., QCTNYALLKLAGDVESNPGP), or an F2A element (e.g., VKQTLNFDLLKLAGDVESNPGP). In some embodiments, the knock-in cassette further comprises a sequence encoding a linker peptide upstream of the 2A element. In some embodiments, the linker peptide comprises the amino acid sequence GSG.

[0052] In some embodiments, the knock-in cassette comprises a polyadenylation sequence, and optionally a 3′ UTR sequence, downstream of the exogenous coding sequence for the gene product of interest, and, if a 3′UTR sequence is present, the 3′UTR sequence is positioned 3′ of the exogenous coding sequence and 5′ of the polyadenylation sequence.

[0053] In some embodiments, the exogenous partial coding sequence of the essential gene in the knock-in cassette encodes a C-terminal fragment of a protein encoded by the essential gene. In some embodiments, the C-terminal fragment is less than about 500, 250, 150, 125, 100, 75, 50, 25, 20, 15 or 10 amino acids in length. In some embodiments, the C-terminal fragment includes an amino acid sequence that is encoded by a region of the endogenous coding sequence of the essential gene that spans the break.

[0054] In some embodiments, the exogenous coding sequence or partial coding sequence of the essential gene in the knock-in cassette is less than 100% identical to the corresponding endogenous coding sequence of the essential gene of the B cell. In some embodiments, the exogenous coding sequence or partial coding sequence of the essential gene in the knock-in cassette has been codon optimized relative to the corresponding endogenous coding sequence of the essential gene of the B cell to remove a target site of the nuclease, to reduce the likelihood of homologous recombination after integration of the knock-in cassette into the genome of the B cell, or to increase expression of the gene product of the essential gene and/or the gene product of interest after integration of the knock-in cassette into the genome of the B cell.

[0055] In some embodiments, the nuclease is a Cas (e.g., Cas9 or Cas12a), the exogenous coding sequence or partial coding sequence of the essential gene in the knock-in cassette includes at least one PAM site for the Cas, and the at least one PAM site (or all PAM sites) has been codon optimized or saturated with silent and/or missense mutations.

[0056] In some embodiments, the essential gene is GAPDH, TBP, E2F4, G6PD, or KIF11.

[0057] In some embodiments, the donor template does not comprise a reporter gene, e.g., a fluorescent reporter gene or an antibiotic resistance gene.

[0058] In some embodiments, the knock-in cassette is a multi-cistronic (e.g., bi-cistronic) knock-in cassette comprising exogenous coding sequences for two or more gene products of interest. In some embodiments, the knock-in cassette comprises a first exogenous coding sequence for a first gene product of interest, a linker (e.g., T2A, P2A, and/or IRES), and a second exogenous coding sequence for a second gene product of interest. In some embodiments, after contacting the population of B cells with the nuclease and the donor template, the genome-edited B cell comprises knock-in cassettes at one or both alleles of the essential gene. In some embodiments, the genome-edited B cell expresses (a) the first and second gene products of interest, and (b) the gene product encoded by the essential gene that is required for survival and/or proliferation of the B cell, or a functional variant thereof.

[0059] In some embodiments, the system comprises a first a donor template that comprises a first knock-in cassette comprising a first exogenous coding sequence for a first gene product of interest in frame with and downstream (3′) of an exogenous coding sequence or partial coding sequence of the essential gene, and with a second donor template that comprises a second knock-in cassette comprising a second exogenous coding sequence for a second gene product of interest in frame with and downstream (3′) of an exogenous coding sequence or partial coding sequence of the essential gene. In some embodiments, after contacting the population of B cells with the nuclease and the donor templates, the genome-edited B cell comprises the first knock-in cassette at a first allele of the essential gene and the second knock-in cassette at the second allele of the essential gene. In some embodiments, the genome-edited B cell expresses (a) the first and second gene products of interest, and (b) the gene product encoded by the essential gene that is required for survival and/or proliferation of the B cell, or a functional variant thereof.

[0060] In some embodiments, the system comprises a first a donor template that comprises a first knock-in cassette comprising a first exogenous coding sequence for a first gene product of interest in frame with and downstream (3′) of an exogenous coding sequence or partial coding sequence of a first essential gene, and with a second donor template that comprises a second knock-in cassette comprising a second exogenous coding sequence for a second gene product of interest in frame with and downstream (3′) of an exogenous coding sequence or partial coding sequence of a second essential gene. In some embodiments, after contacting the population of B cells with the nuclease and the donor templates, the genome-edited B cell comprises the first knock-in cassette at one or both alleles of the first essential gene and the second knock-in cassette at one or both alleles of the second essential gene. In some embodiments, the genome-edited B cell expresses (a) the first and second gene products of interest, and (b) the gene products encoded by the first and second essential genes required for survival and/or proliferation of the B cell, or a functional variant thereof.

[0061] In one aspect, the disclosure features a method of producing a population of modified B cells, the method comprising contacting B cells with: (i) a nuclease that causes a break within an endogenous coding sequence of an essential gene in a plurality of the B cells, wherein the essential gene encodes a gene product that is required for survival and/or proliferation of the B cells, and (ii) a donor template that comprises a knock-in cassette comprising an exogenous coding sequence for a gene product of interest in frame with and downstream (3′) of an exogenous coding sequence or partial coding sequence of the essential gene, wherein the knock-in cassette is integrated into the genome of a plurality of the B cells by homology-directed repair (HDR) of the break, resulting in genome-edited B cells that expresses: (a) the gene product of interest, and (b) the gene product encoded by the essential gene that is required for survival and/or proliferation of the plurality of B cells, or a functional variant thereof, and wherein following the contacting step, at least about 60%, at least about 65%, at least about 70%, at least about 75%, at least about 80%, at least about 85%, at least about 90%, at least about 95%, or more, of the viable B cells are genome-edited B cells, and/or about 40% or less, about 35% or less, about 30% or less, about 25% or less, about 20% or less, about 15% or less, about 10% or less, or about 5% or less, of the B cells lacking an integrated knock-in cassette are viable B cells, thereby producing a population of modified B cells. In some embodiments, following the contacting step, at least about 80% of the viable B cells are genome-edited B cells, and about 20% or less of the B cells lacking an integrated knock-in cassette are viable B cells. In some embodiments, following the contacting step, at least about 60% of the viable B cells are genome-edited B cells, and about 40% or less of the B cells lacking an integrated knock-in cassette are viable B cells. In some embodiments, following the contacting step, at least about 90% of the viable B cells are genome-edited B cells, and about 10% or less of the B cells lacking an integrated knock-in cassette are viable B cells. In some embodiments, following the contacting step, at least about 95% of the viable B cells are genome-edited B cells, and about 5% or less of B cells lacking an integrated knock-in cassette are viable B cells.

[0062] In some embodiments, if the knock-in cassette is not integrated into the genome of the B cell by homology-directed repair (HDR) in the correct position or orientation, the B cell no longer expresses the gene product encoded by the essential gene, or a functional variant thereof.

[0063] In some embodiments, the break is a double-strand break.

[0064] In some embodiments, the break is located within the last 2000, 1500, 1000, 750, 500, 400, 300, 200, 100, or 50 base pairs of the endogenous coding sequence of the essential gene. In some embodiments, the break is located within the last exon of the essential gene.

[0065] In some embodiments, the nuclease is highly efficient, e.g., capable of editing at least about 60%, at least about 65%, at least about 75%, at least about 80%, at least about 85%, at least about 90%, at least about 95%, or more, of B cells contacted with the nuclease. In some embodiments, the nuclease is a zinc finger nuclease (ZFN), a transcription activator-like effector nuclease (TALEN) or a meganuclease. In some embodiments, the nuclease is a CRISPR/Cas nuclease and the method further comprises contacting the B cell (or the population of B cells) with a guide molecule for the CRISPR/Cas nuclease. In some embodiments, the nuclease is a Cas9 or a Cas12a nuclease, or a variant thereof (e.g., a nuclease comprising the amino acid sequence of any one of SEQ ID NOs: 58-66). In some embodiments, the guide molecule comprises a targeting domain sequence that is complementary to a portion of the endogenous coding sequence of the essential gene. In some embodiments, the guide molecule comprises a targeting domain sequence that differs by no more than 3 nucleotides from a sequence that is complementary to a portion of the endogenous coding sequence of the essential gene. In some embodiments, the guide molecule specifically binds to the portion of the endogenous coding sequence of the essential gene. In some embodiments, the guide molecule does not bind to an endogenous coding sequence of another gene, e.g., a different essential gene. In some embodiments, the guide comprises a nucleotide sequence of any one of SEQ ID NOs: 94-157 and 225-1885.

[0066] In some embodiments, the donor template is a donor DNA template, optionally wherein the donor DNA template is double-stranded. In some embodiments, the donor DNA template is a plasmid, optionally wherein the plasmid has not been linearized.

[0067] In some embodiments, the donor template comprises homology arms on either side of the knock-in cassette. In some embodiments, the donor template comprises a 5′ homology arm comprising a sequence homologous to a sequence located 5′ of the break in the genome of the B cell. In some embodiments, the donor template comprises a 3′ homology arm comprising a sequence homologous to a sequence located 3′ of the break in the genome of the B cell. In some embodiments, the donor template comprises a 5′ homology arm comprising a sequence homologous to a sequence located 5′ of the break in the genome of the B cell, and the donor template comprises a 3′ homology arm comprising a sequence homologous to a sequence located 3′ of the break in the genome of the B cell.

[0068] In some embodiments, the knock-in cassette comprises a regulatory element that enables expression of the gene product encoded by the essential gene and the gene product of interest as separate gene products, optionally, wherein at least one of the gene products is a protein and the regulatory element enables expression of that protein separate from the other gene product. In some embodiments, the knock-in cassette comprises an IRES or 2A element located between the exogenous coding sequence or partial coding sequence of the essential gene and the exogenous coding sequence for the gene product of interest. In some embodiments, the 2A element is a T2A element (e.g., EGRGSLLTCGDVEENPGP), a P2A element (e.g., ATNFSLLKQAGDVEENPGP), a E2A element (e.g., QCTNYALLKLAGDVESNPGP), or an F2A element (e.g., VKQTLNFDLLKLAGDVESNPGP). In some embodiments, the knock-in cassette further comprises a sequence encoding a linker peptide upstream of the 2A element. In some embodiments, the linker peptide comprises the amino acid sequence GSG.

[0069] In some embodiments, the knock-in cassette comprises a polyadenylation sequence, and optionally a 3′ UTR sequence, downstream of the exogenous coding sequence for the gene product of interest, and, if a 3′UTR sequence is present, the 3′UTR sequence is positioned 3′ of the exogenous coding sequence and 5′ of the polyadenylation sequence.

[0070] In some embodiments, the exogenous partial coding sequence of the essential gene in the knock-in cassette encodes a C-terminal fragment of a protein encoded by the essential gene. In some embodiments, the C-terminal fragment is less than about 500, 250, 150, 125, 100, 75, 50, 25, 20, 15 or 10 amino acids in length. In some embodiments, the C-terminal fragment includes an amino acid sequence that is encoded by a region of the endogenous coding sequence of the essential gene that spans the break.

[0071] In some embodiments, the exogenous coding sequence or partial coding sequence of the essential gene in the knock-in cassette is less than 100% identical to the corresponding endogenous coding sequence of the essential gene of the B cell. In some embodiments, the exogenous coding sequence or partial coding sequence of the essential gene in the knock-in cassette has been codon optimized relative to the corresponding endogenous coding sequence of the essential gene of the B cell to remove a target site of the nuclease, to reduce the likelihood of homologous recombination after integration of the knock-in cassette into the genome of the B cell, or to increase expression of the gene product of the essential gene and/or the gene product of interest after integration of the knock-in cassette into the genome of the B cell.

[0072] In some embodiments, the nuclease is a Cas (e.g., Cas9 or Cas12a), the exogenous coding sequence or partial coding sequence of the essential gene in the knock-in cassette includes at least one PAM site for the Cas, and the at least one PAM site (or all PAM sites) has been codon optimized or saturated with silent and/or missense mutations.

[0073] In some embodiments, the essential gene is GAPDH, TBP, E2F4, G6PD, or KIF11.

[0074] In some embodiments, the donor template does not comprise a reporter gene, e.g., a fluorescent reporter gene or an antibiotic resistance gene.

[0075] In some embodiments, the knock-in cassette is a multi-cistronic (e.g., bi-cistronic) knock-in cassette comprising exogenous coding sequences for two or more gene products of interest. In some embodiments, the knock-in cassette comprises a first exogenous coding sequence for a first gene product of interest, a linker (e.g., T2A, P2A, and/or IRES), and a second exogenous coding sequence for a second gene product of interest. In some embodiments, the genome-edited B cells comprise knock-in cassettes at one or both alleles of the essential gene. In some embodiments, the genome-edited B cells expresses (a) the first and second gene products of interest, and (b) the gene product encoded by the essential gene that is required for survival and/or proliferation of the B cells, or a functional variant thereof.

[0076] In some embodiments, the method comprises contacting the B cells (or the population of B cells) with a first a donor template that comprises a first knock-in cassette comprising a first exogenous coding sequence for a first gene product of interest in frame with and downstream (3′) of an exogenous coding sequence or partial coding sequence of the essential gene, and with a second donor template that comprises a second knock-in cassette comprising a second exogenous coding sequence for a second gene product of interest in frame with and downstream (3′) of an exogenous coding sequence or partial coding sequence of the essential gene. In some embodiments, the genome-edited B cells comprise the first knock-in cassette at a first allele of the essential gene and the second knock-in cassette at the second allele of the essential gene. In some embodiments, the genome-edited B cells expresses (a) the first and second gene products of interest, and (b) the gene product encoded by the essential gene that is required for survival and/or proliferation of the B cells, or a functional variant thereof.

[0077] In some embodiments, the method comprises contacting the B cells (or the population of B cells) with a first a donor template that comprises a first knock-in cassette comprising a first exogenous coding sequence for a first gene product of interest in frame with and downstream (3′) of an exogenous coding sequence or partial coding sequence of a first essential gene, and with a second donor template that comprises a second knock-in cassette comprising a second exogenous coding sequence for a second gene product of interest in frame with and downstream (3′) of an exogenous coding sequence or partial coding sequence of a second essential gene. In some embodiments, the genome-edited B cells comprise the first knock-in cassette at one or both alleles of the first essential gene and the second knock-in cassette at one or both alleles of the second essential gene. In some embodiments, the genome-edited B cells expresses (a) the first and second gene products of interest, and (b) the gene products encoded by the first and second essential genes required for survival and/or proliferation of the B cells, or a functional variant thereof.

[0078] In another aspect, the disclosure features a method of selecting and/or identifying a B cell comprising a knock-in of a gene product of interest within an endogenous coding sequence of an essential gene in the B cell, the method comprising contacting a population of B cells with: (i) a nuclease that causes a break within an endogenous coding sequence of an essential gene in a plurality of the B cells, wherein the essential gene encodes a gene product that is required for survival and/or proliferation of the B cells, and (ii) a donor template that comprises a knock-in cassette comprising an exogenous coding sequence for a gene product of interest in frame with and downstream (3′) of an exogenous coding sequence or partial coding sequence of the essential gene, wherein the knock-in cassette is integrated into the genome of a plurality of the B cells by homology-directed repair (HDR) of the break, and identifying a genome-edited B cell within the population of B cells that expresses: (a) the gene product of interest, and (b) the gene product encoded by the essential gene that is required for survival and/or proliferation of the B cell, or a functional variant thereof.

[0079] In some embodiments, following the contacting step, at least about 60%, at least about 65%, at least about 70%, at least about 75%, at least about 80%, at least about 85%, at least about 90%, at least about 95%, or more, of the viable B cells of the population of B cells are genome-edited B cells, and/or about 40% or less, about 35% or less, about 30% or less, about 25% or less, about 20% or less, about 15% or less, about 10% or less, or about 5% or less, of the population of B cells lacking an integrated knock-in cassette are viable B cells. In some embodiments, following the contacting step, at least about 80% of the viable B cells of the population of B cells are genome-edited B cells, and about 20% or less of the population of B cells lacking an integrated knock-in cassette are viable B cells. In some embodiments, following the contacting step, at least about 60% of the viable B cells of the population of B cells are genome-edited B cells, and about 40% or less of the population of B cells lacking an integrated knock-in cassette are viable B cells. In some embodiments, following the contacting step, at least about 90% of the viable B cells of the population of B cells are genome-edited B cells, and about 10% or less of the population of B cells lacking an integrated knock-in cassette are viable B cells. In some embodiments, following the contacting step, at least about 95% of the viable B cells of the population of B cells are genome-edited B cells, and about 5% or less of the population of B cells lacking an integrated knock-in cassette are viable B cells.

[0080] In some embodiments, if the knock-in cassette is not integrated into the genome of the B cell by homology-directed repair (HDR) in the correct position or orientation, the B cell no longer expresses the gene product encoded by the essential gene, or a functional variant thereof.

[0081] In some embodiments, the break is a double-strand break.

[0082] In some embodiments, the break is located within the last 2000, 1500, 1000, 750, 500, 400, 300, 200, 100, or 50 base pairs of the endogenous coding sequence of the essential gene. In some embodiments, the break is located within the last exon of the essential gene.

[0083] In some embodiments, the nuclease is highly efficient, e.g., capable of editing at least about 60%, at least about 65%, at least about 75%, at least about 80%, at least about 85%, at least about 90%, at least about 95%, or more, of B cells contacted with the nuclease. In some embodiments, the nuclease is a zinc finger nuclease (ZFN), a transcription activator-like effector nuclease (TALEN) or a meganuclease. In some embodiments, the nuclease is a CRISPR/Cas nuclease and the method further comprises contacting the B cell (or the population of B cells) with a guide molecule for the CRISPR/Cas nuclease. In some embodiments, the nuclease is a Cas9 or a Cas12a nuclease, or a variant thereof (e.g., a nuclease comprising the amino acid sequence of any one of SEQ ID NOs: 58-66). In some embodiments, the guide molecule comprises a targeting domain sequence that is complementary to a portion of the endogenous coding sequence of the essential gene. In some embodiments, the guide molecule comprises a targeting domain sequence that differs by no more than 3 nucleotides from a sequence that is complementary to a portion of the endogenous coding sequence of the essential gene. In some embodiments, the guide molecule specifically binds to the portion of the endogenous coding sequence of the essential gene. In some embodiments, the guide molecule does not bind to an endogenous coding sequence of another gene, e.g., a different essential gene. In some embodiments, the guide comprises a nucleotide sequence of any one of SEQ ID NOs: 94-157 and 225-1885.

[0084] In some embodiments, the donor template is a donor DNA template, optionally wherein the donor DNA template is double-stranded. In some embodiments, the donor DNA template is a plasmid, optionally wherein the plasmid has not been linearized.

[0085] In some embodiments, the donor template comprises homology arms on either side of the knock-in cassette. In some embodiments, the donor template comprises a 5′ homology arm comprising a sequence homologous to a sequence located 5′ of the break in the genome of the B cell. In some embodiments, the donor template comprises a 3′ homology arm comprising a sequence homologous to a sequence located 3′ of the break in the genome of the B cell. In some embodiments, the donor template comprises a 5′ homology arm comprising a sequence homologous to a sequence located 5′ of the break in the genome of the B cell, and the donor template comprises a 3′ homology arm comprising a sequence homologous to a sequence located 3′ of the break in the genome of the B cell.

[0086] In some embodiments, the knock-in cassette comprises a regulatory element that enables expression of the gene product encoded by the essential gene and the gene product of interest as separate gene products, optionally, wherein at least one of the gene products is a protein and the regulatory element enables expression of that protein separate from the other gene product. In some embodiments, the knock-in cassette comprises an IRES or 2A element located between the exogenous coding sequence or partial coding sequence of the essential gene and the exogenous coding sequence for the gene product of interest. In some embodiments, the 2A element is a T2A element (e.g., EGRGSLLTCGDVEENPGP), a P2A element (e.g., ATNFSLLKQAGDVEENPGP), a E2A element (e.g., QCTNYALLKLAGDVESNPGP), or an F2A element (e.g., VKQTLNFDLLKLAGDVESNPGP). In some embodiments, the knock-in cassette further comprises a sequence encoding a linker peptide upstream of the 2A element. In some embodiments, the linker peptide comprises the amino acid sequence GSG.

[0087] In some embodiments, the knock-in cassette comprises a polyadenylation sequence, and optionally a 3′ UTR sequence, downstream of the exogenous coding sequence for the gene product of interest, and, if a 3′UTR sequence is present, the 3′UTR sequence is positioned 3′ of the exogenous coding sequence and 5′ of the polyadenylation sequence.

[0088] In some embodiments, the exogenous partial coding sequence of the essential gene in the knock-in cassette encodes a C-terminal fragment of a protein encoded by the essential gene. In some embodiments, the C-terminal fragment is less than about 500, 250, 150, 125, 100, 75, 50, 25, 20, 15 or 10 amino acids in length. In some embodiments, the C-terminal fragment includes an amino acid sequence that is encoded by a region of the endogenous coding sequence of the essential gene that spans the break.

[0089] In some embodiments, the exogenous coding sequence or partial coding sequence of the essential gene in the knock-in cassette is less than 100% identical to the corresponding endogenous coding sequence of the essential gene of the B cell. In some embodiments, the exogenous coding sequence or partial coding sequence of the essential gene in the knock-in cassette has been codon optimized relative to the corresponding endogenous coding sequence of the essential gene of the B cell to remove a target site of the nuclease, to reduce the likelihood of homologous recombination after integration of the knock-in cassette into the genome of the B cell, or to increase expression of the gene product of the essential gene and/or the gene product of interest after integration of the knock-in cassette into the genome of the B cell.

[0090] In some embodiments, the nuclease is a Cas (e.g., Cas9 or Cas12a), the exogenous coding sequence or partial coding sequence of the essential gene in the knock-in cassette includes at least one PAM site for the Cas, and the at least one PAM site (or all PAM sites) has been codon optimized or saturated with silent and/or missense mutations.

[0091] In some embodiments, the essential gene is GAPDH, TBP, E2F4, G6PD, or KIF11.

[0092] In some embodiments, the donor template does not comprise a reporter gene, e.g., a fluorescent reporter gene or an antibiotic resistance gene.

[0093] In some embodiments, the knock-in cassette is a multi-cistronic (e.g., bi-cistronic) knock-in cassette comprising exogenous coding sequences for two or more gene products of interest. In some embodiments, the knock-in cassette comprises a first exogenous coding sequence for a first gene product of interest, a linker (e.g., T2A, P2A, and/or IRES), and a second exogenous coding sequence for a second gene product of interest. In some embodiments, the genome-edited B cell comprises knock-in cassettes at one or both alleles of the essential gene. In some embodiments, the genome-edited B cell expresses (a) the first and second gene products of interest, and (b) the gene product encoded by the essential gene that is required for survival and/or proliferation of the B cell, or a functional variant thereof.

[0094] In some embodiments, the method comprises contacting the population of B cells with a first a donor template that comprises a first knock-in cassette comprising a first exogenous coding sequence for a first gene product of interest in frame with and downstream (3′) of an exogenous coding sequence or partial coding sequence of the essential gene, and with a second donor template that comprises a second knock-in cassette comprising a second exogenous coding sequence for a second gene product of interest in frame with and downstream (3′) of an exogenous coding sequence or partial coding sequence of the essential gene. In some embodiments, the genome-edited B cells comprises the first knock-in cassette at a first allele of the essential gene and the second knock-in cassette at the second allele of the essential gene. In some embodiments, the genome-edited B cells expresses (a) the first and second gene products of interest, and (b) the gene product encoded by the essential gene that is required for survival and/or proliferation of the B cell, or a functional variant thereof.

[0095] In some embodiments, the method comprises contacting the population of B cells with a first a donor template that comprises a first knock-in cassette comprising a first exogenous coding sequence for a first gene product of interest in frame with and downstream (3′) of an exogenous coding sequence or partial coding sequence of a first essential gene, and with a second donor template that comprises a second knock-in cassette comprising a second exogenous coding sequence for a second gene product of interest in frame with and downstream (3′) of an exogenous coding sequence or partial coding sequence of a second essential gene. In some embodiments, the genome-edited B cells comprises the first knock-in cassette at one or both alleles of the first essential gene and the second knock-in cassette at one or both alleles of the second essential gene. In some embodiments, the genome-edited B cell expresses (a) the first and second gene products of interest, and (b) the gene products encoded by the first and second essential genes required for survival and/or proliferation of the B cell, or a functional variant thereof.

### BRIEF DESCRIPTION OF THE DRAWING

[0096] The teachings described herein will be more fully understood from the following description of various exemplary embodiments, when read together with the accompanying drawing. It should be understood that the drawing described below is for illustration purposes only and is not intended to limit the scope of the present teachings in any way.

[0097] FIG. 1 shows the locations on the GAPDH gene where exemplary AsCpf1 (AsCas12a) guide RNAs bind, and the results of screening the exemplary guide RNAs that target the GAPDH gene three days after transfection. Results are from gDNA from living cells.

[0098] FIG. 2 shows results of screening the exemplary AsCpf1 (AsCas12a) guide RNAs that target the GAPDH gene, three days after transfection. Results are from gDNA from living cells.

[0099] FIG. 3A shows an exemplary integration strategy that targets an essential gene according to certain embodiments of the present disclosure. In particular embodiments, introducing a double strand break using CRISPR gene editing (e.g., by Cas12a or Cas9) within a terminal exon (e.g., within about 500 bp upstream (5′) of the stop codon of the essential gene) and administering a donor plasmid with homology arms designed to mediate homology directed repair (HDR) at the cleavage site, results in a population of viable cells carrying a cargo of interest integrated at the essential gene locus. Those cells that were edited by the CRISPR nuclease, but failed to undergo integration of the cargo at the essential gene locus, do not survive.

[0100] FIG. 3B shows an exemplary integration strategy that targets the GAPDH gene according to certain embodiments of the present disclosure. The strategy in FIG. 3B can be applied to a variety of cell types, including primary cells, induced pluripotent stem cells (iPSCs), HSCs, and B cells.

[0101] FIG. 3C shows an exemplary integration strategy that targets the GAPDH gene according to certain embodiments of the present disclosure. The diagram shows that the only cells that should survive over time are those cells that underwent targeted integration of a cassette that restores the GAPDH locus and includes a cargo of interest, as well as unedited cells. The population of unedited cells following CRISPR editing should be small if the nuclease and guide RNA are highly effective at cleaving the essential gene target site and introduce indels that significantly reduce the function of the essential gene product.

[0102] FIG. 3D shows an exemplary integration strategy that targets an essential gene according to certain embodiments of the present disclosure. In particular embodiments, introducing a double strand break using CRISPR gene editing (e.g., by Cas12a or Cas9) to target a 5′ exon (e.g., within about 500 bp downstream (3′) of a start codon of the essential gene) and administering a donor plasmid with homology arms designed to mediate homology directed repair (HDR) at the cleavage site, results in a population of viable cells carrying a cargo of interest integrated at the essential gene locus. Those cells that were edited by the CRISPR nuclease, but failed to undergo integration of the cargo at the essential gene locus, do not survive.

[0103] FIG. 4A depicts exemplary flow cytometry data from AAV6-mediated knock-in of GFP into B cells without RNPs. Unedited cells made up 100.0% of the bulk population.

[0104] FIG. 4B depicts exemplary flow cytometry data from AAV6-mediated knock-in of GFP into B cells using RNPs comprising RSQ22337 targeting GAPDH and Cas12a (SEQ ID NO: 62). Edited GFP+ cells made up 96.8% of the bulk population. Results from three replicates are graphed in the right panel, which has a Y-axis that represents the percentage of GFP+ cells in the bulk population as measured by flow cytometry.

[0105] FIG. 5A depicts exemplary flow cytometry data from wild-type (WT) B cells. CD19+ cells made up 100% of the bulk population. GFP+ cells made up 0% of the bulk population.

[0106] FIG. 5B depicts exemplary flow cytometry data from B cells with AAV6-mediated knock-in of GFP using RNPs comprising RSQ22337 targeting GAPDH and Cas12a (SEQ ID NO: 62). CD19+GFP+ cells made up 97.0% of the bulk population.

[0107] FIG. 6 depicts exemplary flow cytometry data from B cells with (i) double knockout (DKO) of B2M and CIITA and (ii) knock-in of a HLA-E transgenic construct, using RNPs comprising gRNAs targeting B2M, CIITA, and GAPDH and Cas12a (SEQ ID NO: 62) and AAV-mediated knock-in of the HLA-E transgenic construct, as described in WO 2022/272292, at the GAPDH locus through AAV transduction. As shown in the plot at left, B2M/CIITA DKO cells made up about 95.5% of the bulk population, and as shown in the plot at center, HLA-E+ cells made up about 90.5% of the B2M/CIITA DKO cells. Unedited control cells exhibited no notable expression of HLA-E as displayed in the plot at right. The X-axis of the left plot represents CIITA expression, and the Y-axis of the left plot represents B2M expression. The X-axis of the center and right plots represents HLA-E expression, and the Y-axis of the center and right plots represents side scatter.

[0108] FIG. 7 depicts exemplary knockout and knock-in efficiency in B cells as measured by flow cytometry. RNPs comprising Cas12a (SEQ ID NO: 62) and a gRNA (SEQ ID NO: 2000) targeting B2M, either gRNA #1 (SEQ ID NO: 2001) or gRNA #2 (SEQ ID NO: 2002) targeting CIITA, and RSQ22337 targeting GAPDH were used to knockout B2M and CIITA and to knock-in a HLA-E transgenic construct, as described in WO 2022/272292, at the GAPDH locus through AAV transduction. The X axis denotes the edit (DKO=B2M and CIITA double knock-out; HLAE+=HLA-E knock-in) and the CIITA gRNA used, with each set of vertical bars per edit representing varying RNP concentration (from left to right: 4 uM, 2 uM, 1 uM). The Y axis represents the percentage of cells containing the noted edit as determined by flow cytometry.

### DETAILED DESCRIPTION

### Definitions and Abbreviations

[0109] Unless otherwise specified, each of the following terms have the meaning set forth in this section.

[0110] The indefinite articles “a” and “an” refer to at least one of the associated noun, and are used interchangeably with the terms “at least one” and “one or more.” The conjunctions “or” and “and/or” are used interchangeably as non-exclusive disjunctions.

[0111] The term “antibody” as used herein refers to a polypeptide that includes canonical immunoglobulin sequence elements sufficient to confer specific binding to a particular target antigen. As is known in the art, intact antibodies as produced in nature are approximately 150 kD tetrameric agents comprised of two identical heavy chain polypeptides (about 50 kD each) and two identical light chain polypeptides (about 25 kD each) that associate with each other into what is commonly referred to as a “Y-shaped” structure. Each heavy chain is comprised of at least four domains (each about 110 amino acids long)—an amino-terminal variable (VH) domain (located at the tips of the Y structure), followed by three constant domains: CH1, CH2, and the carboxy-terminal CH3 (located at the base of the Y's stem). A short region, known as the “switch”, connects the heavy chain variable and constant regions. The “hinge” connects CH2 and CH3 domains to the rest of the antibody. Two disulfide bonds in this hinge region connect the two heavy chain polypeptides to one another in an intact antibody. Each light chain is comprised of two domains—an amino-terminal variable (VL) domain, followed by a carboxy-terminal constant (CL) domain, separated from one another by another “switch”. Intact antibody tetramers are composed of two heavy chain-light chain dimers in which the heavy and light chains are linked to one another by a single disulfide bond; two other disulfide bonds connect the heavy chain hinge regions to one another, so that the dimers are connected to one another and the tetramer is formed. Naturally-produced antibodies are also glycosylated, typically on the CH2 domain. Each domain in a natural antibody has a structure characterized by an “immunoglobulin fold” formed from two beta sheets (e.g., 3-, 4-, or 5-stranded sheets) packed against each other in a compressed antiparallel beta barrel. Each variable domain contains three hypervariable loops known as “complement determining regions” (CDR1, CDR2, and CDR3) and four somewhat invariant “framework” regions (FR1, FR2, FR3, and FR4). When natural antibodies fold, the FR regions form the beta sheets that provide the structural framework for the domains, and the CDR loop regions from both the heavy and light chains are brought together in three-dimensional space so that they create a single hypervariable antigen binding site located at the tip of the Y structure. The Fc region of naturally-occurring antibodies binds to elements of the complement system, and also to receptors on effector cells, including for example effector cells that mediate cytotoxicity. As is known in the art, affinity and/or other binding attributes of Fe regions for Fe receptors can be modulated through glycosylation or other modification. In some embodiments, antibodies produced and/or utilized in accordance with the present disclosure include glycosylated Fe domains, including Fe domains with modified or engineered such glycosylation. For purposes of the present disclosure, in certain embodiments, any polypeptide or complex of polypeptides that includes sufficient immunoglobulin domain sequences as found in natural antibodies can be referred to and/or used as an “antibody”, whether such polypeptide is naturally produced (e.g., generated by an organism reacting to an antigen), or produced by recombinant engineering, chemical synthesis, or other artificial system or methodology. In some embodiments, an antibody is polyclonal; in some embodiments, an antibody is monoclonal. In some embodiments, an antibody has constant region sequences that are characteristic of mouse, rabbit, primate, or human antibodies. In some embodiments, antibody sequence elements are fully human, or are humanized, primatized, chimeric, etc., as is known in the art. Moreover, the term “antibody” as used herein, can refer in appropriate embodiments (unless otherwise stated or clear from context) to any of the art-known or developed constructs or formats for utilizing antibody structural and functional features in alternative presentation. For example, in some embodiments, an antibody utilized in accordance with the present disclosure is in a format selected from, but not limited to, intact IgG, IgE and IgM, bi- or multi-specific antibodies (e.g., Zybodies®, etc.), bi- or multi-paratopic antibodies, single chain Fys, polypeptide-Fc fusions, Fabs, camelid antibodies, masked antibodies (e.g., Probodies®), Small Modular ImmunoPharmaceuticals (“SMIPs™”), single chain or Tandem diabodies (TandAb®), VHHs, Anticalins®, Nanobodies®, minibodies, BiTE®s, ankyrin repeat proteins or DARPINs®, Avimers®, a DART, a TCR-like antibody, Adnectins®, Affilins®, Trans-Bodies®, Affibodies®, a TrimerX®, MicroProteins, Fynomers®, Centyrins®, and a KALBITOR®. In some embodiments, an antibody may lack a covalent modification (e.g., attachment of a glycan) that it would have if produced naturally. In some embodiments, an antibody may contain a covalent modification (e.g., attachment of a glycan, a payload (e.g., a detectable moiety, a therapeutic moiety, a catalytic moiety, etc.), or other pendant group (e.g., poly-ethylene glycol, etc.)).

[0112] The term “cancer” (also used interchangeably with the term “neoplastic”), as used herein, refers to cells having the capacity for autonomous growth, i.e., an abnormal state or condition characterized by rapidly proliferating cell growth. Cancerous disease states may be categorized as pathologic, i.e., characterizing or constituting a disease state, e.g., malignant tumor growth, or may be categorized as non-pathologic, i.e., a deviation from normal but not associated with a disease state, e.g., cell proliferation associated with wound repair.

[0113] The terms “CRISPR/Cas nuclease” as used herein refer to any CRISPR/Cas protein with DNA nuclease activity, e.g., a Cas9 or a Cas12 protein that exhibits specific association (or “targeting”) to a DNA target site, e.g., within a genomic sequence in a cell in the presence of a guide molecule. The strategies, systems, and methods disclosed herein can use any combination of CRISPR/Cas nuclease disclosed herein, or known to those of ordinary skill in the art. Those of ordinary skill in the art will be aware of additional CRISPR/Cas nucleases and variants suitable for use in the context of the present disclosure, and it will be understood that the present disclosure is not limited in this respect.

[0114] The term “differentiation” as used herein is the process by which an unspecialized (“uncommitted”) or less specialized cell acquires the features of a specialized cell such as, for example, a blood cell. In some embodiments, a differentiated or differentiation-induced cell is one that has taken on a more specialized (“committed”) position within the lineage of a cell. For example, an iPS cell (iPSC) can be differentiated into various more differentiated cell types, for example, a hematopoietic stem cell, a lymphocyte, and other cell types, upon treatment with suitable differentiation factors in the cell culture medium. Suitable methods, differentiation factors, and cell culture media for the differentiation of pluri- and multipotent cell types into more differentiated cell types are well known to those of skill in the art. In some embodiments, the term “committed”, is applied to the process of differentiation to refer to a cell that has proceeded through a differentiation pathway to a point where, under normal circumstances, it would or will continue to differentiate into a specific cell type or subset of cell types, and cannot, under normal circumstances, differentiate into a different cell type (other than a specific cell type or subset of cell types) nor revert to a less differentiated cell type.

[0115] The term “nuclease” as used herein refers to any protein that catalyzes the cleavage of phosphodiester bonds. In some embodiments the nuclease is a DNA nuclease. In some embodiments the nuclease is a “nickase” which causes a single-strand break when it cleaves double-stranded DNA, e.g., genomic DNA in a cell. In some embodiments the nuclease causes a double-strand break when it cleaves double-stranded DNA, e.g., genomic DNA in a cell. In some embodiments the nuclease binds a specific target site within the double-stranded DNA that overlaps with or is adjacent to the location of the resulting break. In some embodiments, the nuclease causes a double-strand break that contains overhangs ranging from 0 (blunt ends) to 22 nucleotides in both 3′ and 5′ orientations. As discussed herein, CRISPR/Cas nucleases, zinc finger nucleases (ZFNs), transcription activator-like effector nucleases (TALENs) and meganucleases are exemplary nucleases that can be used in accordance with the strategies, systems, and methods of the present disclosure.

[0116] The term “embryonic stem cell” as used herein refers to pluripotent stem cells derived from the inner cell mass of the embryonic blastocyst. In some embodiments, embryonic stem cells are pluripotent and give rise during development to all derivatives of the three primary germ layers: ectoderm, endoderm and mesoderm. In some such embodiments, embryonic stem cells do not contribute to the extra-embryonic membranes or the placenta, i.e., are not totipotent.

[0117] The term “endogenous” as used herein in the context of nucleic acids refers to a native nucleic acid (e.g., a gene, a protein coding sequence) in its natural location, e.g., within the genome of a cell.

[0118] The term “essential gene” as used herein with respect to a cell refers to a gene that encodes at least one gene product that is required for survival, proliferation, development, and/or differentiation of the cell. An essential gene can be a housekeeping gene that is essential for survival of all cell types or a gene that is required to be expressed in a specific cell type for survival, proliferation, and development under particular culture conditions, e.g., for proper differentiation of iPS or ES cells or expansion of iPS- or ES-derived cells. Loss of function of an essential gene results, in some embodiments, in a significant reduction of cell survival, e.g., of the time a cell characterized by a loss of function of an essential gene survives as compared to a cell of the same cell type but without a loss of function of the same essential gene. In some embodiments, loss of function of an essential gene results in the death of the affected cell. In some embodiments, loss of function of an essential gene results in a significant reduction of cell proliferation, e.g., in the ability of a cell to divide, which can manifest in a significant time period the cell requires to complete a cell cycle, or, in some preferred embodiments, in a loss of a cell's ability to complete a cell cycle, and thus to proliferate at all.

[0119] The term “exogenous,” as used herein in the context of nucleic acids refers to a nucleic acid (whether native or non-native) that has been artificially introduced into a man-made construct (e.g., a knock-in cassette, or a donor template) or into the genome of a cell using, for example, gene editing or genetic engineering techniques, e.g., HDR based integration techniques.

[0120] The term “guide molecule” or “guide RNA” or “gRNA” when used in reference to a CRISPR/Cas system is any nucleic acid that promotes the specific association (or “targeting”) of a CRISPR/Cas nuclease, e.g., a Cas9 or a Cas12 protein to a DNA target site such as within a genomic sequence in a cell. While guide molecules are typically RNA molecules it is well known in the art that chemically modified RNA molecules including DNA/RNA hybrid molecules can be used as guide molecules.

[0121] The terms “hematopoietic stem cell,” or “definitive hematopoietic stem cell” as used herein, refer to CD34-positive (CD34+) stem cells. In some embodiments, CD34-positive stem cells are capable of giving rise to mature lymphoid cell types. In some embodiments, the lymphoid cell types include, for example, B cells.

[0122] The terms “induced pluripotent stem cell”, “iPS cell” or “iPSC” as used herein to refer to a stem cell obtained from a differentiated somatic (e.g., adult, neonatal, or fetal) cell by a process referred to as reprogramming (e.g., dedifferentiation). In some embodiments, reprogrammed cells are capable of differentiating into tissues of all three germ or dermal layers: mesoderm, endoderm, and ectoderm. iPSCs are not found in nature.

[0123] The term “multipotent stem cell” as used herein refers to a cell that has the developmental potential to differentiate into cells of one or more germ layers (ectoderm, mesoderm and endoderm), but not all three germ layers. Thus, in some embodiments, a multipotent cell may also be termed a “partially differentiated cell.” Multipotent cells are well-known in the art, and examples of multipotent cells include adult stem cells, such as for example, hematopoietic stem cells and neural stem cells. In some embodiments, “multipotent” indicates that a cell may form many types of cells in a given lineage, but not cells of other lineages. For example, a multipotent hematopoietic cell can form the many different types of blood cells (red, white, platelets, etc.), but it cannot form neurons. Accordingly, in some embodiments, “multipotency” refers to a state of a cell with a degree of developmental potential that is less than totipotent and pluripotent.

[0124] The term “pluripotent” as used herein refers to ability of a cell to form all lineages of the body or soma (i.e., the embryo proper) or a given organism (e.g., human). For example, embryonic stem cells are a type of pluripotent stem cells that are able to form cells from each of the three germ layers, the ectoderm, the mesoderm, and the endoderm. Generally, pluripotency may be described as a continuum of developmental potencies ranging from an incompletely or partially pluripotent cell (e.g., an epiblast stem cell or EpiSC), which is unable to give rise to a complete organism to the more primitive, more pluripotent cell, which is able to give rise to a complete organism (e.g., an embryonic stem cell or an induced pluripotent stem cell).

[0125] The term “pluripotency” as used herein refers to a cell that has the developmental potential to differentiate into cells of all three germ layers (ectoderm, mesoderm, and endoderm). In some embodiments, pluripotency can be determined, in part, by assessing pluripotency characteristics of the cells. In some embodiments, pluripotency characteristics include, but are not limited to: (i) pluripotent stem cell morphology; (ii) the potential for unlimited self-renewal; (iii) expression of pluripotent stem cell markers including, but not limited to SSEA1 (mouse only), SSEA3/4, SSEA5, TRA1-60/81, TRA1-85, TRA2-54, GC™-2, TG343, TG30, CD9, CD29, CD133/prominin, CD140a, CD56, CD73, CD90, CD105, OCT4 (also known as POU5F1), NANOG, SOX2, CD30 and/or CD50; (iv) ability to differentiate to all three somatic lineages (ectoderm, mesoderm and endoderm); (v) teratoma formation consisting of the three somatic lineages; and (vi) formation of embryoid bodies consisting of cells from the three somatic lineages.

[0126] The term “pluripotent stem cell morphology” as used herein refers to the classical morphological features of an embryonic stem cell. In some embodiments, normal embryonic stem cell morphology is characterized as small and round in shape, with a high nucleus-to-cytoplasm ratio, the notable presence of nucleoli, and typical intercell spacing.

[0127] The term “polycistronic” or “multicistronic” when used herein with reference to a knock-in cassette refers to the fact that the knock-in cassette can express two or more proteins from the same mRNA transcript. Similarly, a “bicistronic” knock-in cassette is a knock-in cassette that can express two proteins from the same mRNA transcript.

[0128] The term “polynucleotide” (including, but not limited to “nucleotide sequence”, “nucleic acid”, “nucleic acid molecule”, “nucleic acid sequence”, and “oligonucleotide”) as used herein refers to a series of nucleotide bases (also called “nucleotides”) and means any chain of two or more nucleotides. In some embodiments, polynucleotides, nucleotide sequences, nucleic acids, etc. can be chimeric mixtures or derivatives or modified versions thereof, single-stranded or double-stranded. In some such embodiments, modifications can occur at the base moiety, sugar moiety, or phosphate backbone, for example, to improve stability of the molecule, its hybridization parameters, etc. In general, a nucleotide sequence typically carries genetic information, including, but not limited to, the information used by cellular machinery to make proteins and enzymes. In some embodiments, a nucleotide sequence and/or genetic information comprises double- or single-stranded genomic DNA, RNA, any synthetic and genetically manipulated polynucleotide, and/or sense and/or antisense polynucleotides. In some embodiments, nucleic acids contain modified bases.

[0129] Conventional IUPAC notation is used in nucleotide sequences presented herein, as shown in Table 1, below (see also Cornish-Bowden, Nucleic Acids Res. 1985; 13(9):3021-30, incorporated by reference herein). It should be noted, however, that “T” denotes “Thymine or Uracil” in those instances where a sequence may be encoded by either DNA or RNA, for example in certain CRISPR/Cas guide molecule targeting domains.

TABLE 1
IUPAC nucleic acid notation

| Character | Base |
|---|---|
| A | Adenine |
| T | Thymine or Uracil |
| G | Guanine |
| C | Cytosine |
| U | Uracil |
| K | G or T/U |
| M | A or C |
| R | A or G |
| Y | C or T/U |
| S | C or G |
| W | A or T/U |
| B | C, G or T/U |
| V | A, C or G |
| H | A, C or T/U |
| D | A, G or T/U |
| N | A, C, G or T/U |

[0130] The terms “potency” or “developmental potency” as used herein refer to the sum of all developmental options accessible to the cell (i.e., the developmental potency), particularly, for example in the context of cellular developmental potential. In some embodiments, the continuum of cell potency includes, but is not limited to, totipotent cells, pluripotent cells, multipotent cells, oligopotent cells, unipotent cells, and terminally differentiated cells.

[0131] The terms “prevent,” “preventing,” and “prevention” as used herein with reference to a disease refer to the prevention of the disease in a mammal, e.g., in a human, including (a) avoiding or precluding the disease; (b) affecting the predisposition toward the disease; or (c) preventing or delaying the onset of at least one symptom of the disease.

[0132] The terms “protein,” “peptide” and “polypeptide” as used herein are used interchangeably to refer to a sequential chain of amino acids linked together via peptide bonds. The terms include individual proteins, groups or complexes of proteins that associate together, as well as fragments or portions, variants, derivatives and analogs of such proteins. Unless otherwise specified, peptide sequences are presented herein using conventional notation, beginning with the amino or N-terminus on the left, and proceeding to the carboxyl or C-terminus on the right. Standard one-letter or three-letter abbreviations can be used.

[0133] The term “gene product of interest” as used herein can refer to any product encoded by a gene including any polynucleotide or polypeptide. In some embodiments the gene product is a protein which is not naturally expressed by a target cell of the present disclosure. It is to be understood that the methods and cells of the present disclosure are not limited to any particular gene product of interest and that the selection of a gene product of interest will depend on the type of cell and ultimate use of the cells.

[0134] The term “reporter gene” as used herein refers to an exogenous gene that has been introduced into a cell, e.g., integrated into the genome of the cell, that confers a trait suitable for artificial selection. Common reporter genes are fluorescent reporter genes that encode a fluorescent protein, e.g., green fluorescent protein (GFP) and antibiotic resistance genes that confer antibiotic resistance to cells.

[0135] The terms “reprogramming” or “dedifferentiation” or “increasing cell potency” or “increasing developmental potency” as used herein refer to a method of increasing potency of a cell or dedifferentiating a cell to a less differentiated state. For example, in some embodiments, a cell that has an increased cell potency has more developmental plasticity (i.e., can differentiate into more cell types) compared to the same cell in the non-reprogrammed state. That is, in some embodiments, a reprogrammed cell is one that is in a less differentiated state than the same cell in a non-reprogrammed state. In some embodiments, “reprogramming” refers to de-differentiating a somatic cell, or a multipotent stem cell, into a pluripotent stem cell, also referred to as an induced pluripotent stem cell, or iPSC. Suitable methods for the generation of iPSCs from somatic or multipotent stem cells are well known to those of skill in the art.

[0136] The term “subject” as used herein means a human or non-human animal. In some embodiments a human subject can be any age (e.g., a fetus, infant, child, young adult, or adult). In some embodiments a human subject may be at risk of or suffer from a disease, or may be in need of alteration of a gene or a combination of specific genes. Alternatively, in some embodiments, a subject may be a non-human animal, which may include, but is not limited to, a mammal. In some embodiments, a non-human animal is a non-human primate, a rodent (e.g., a mouse, rat, hamster, guinea pig, etc.), a rabbit, a dog, a cat, and so on. In certain embodiments of this disclosure, the non-human animal subject is livestock, e.g., a cow, a horse, a sheep, a goat, etc. In certain embodiments, the non-human animal subject is poultry, e.g., a chicken, a turkey, a duck, etc.

[0137] The terms “treatment,” “treat,” and “treating,” as used herein refer to a clinical intervention aimed to reverse, alleviate, delay the onset of, or inhibit the progress, ameliorate, reduce severity of, prevent or delay the recurrence of a disease, disorder, or condition or one or more symptoms thereof, and/or improve one or more symptoms of a disease, disorder, or condition as described herein. In some embodiments, a condition includes an injury. In some embodiments, an injury may be acute or chronic (e.g., tissue damage from an underlying disease or disorder that causes, e.g., secondary damage such as tissue injury). In some embodiments, treatment, e.g., in the form of a B cell or a population of B cells as described herein, may be administered to a subject after one or more symptoms have developed and/or after a disease has been diagnosed. Treatment may be administered in the absence of symptoms, e.g., to prevent or delay onset of a symptom or inhibit onset or progression of a disease. For example, in some embodiments, treatment may be administered to a susceptible subject prior to the onset of symptoms (e.g., in light of genetic or other susceptibility factors). In some embodiments, treatment may also be continued after symptoms have resolved, for example to prevent or delay their recurrence. In some embodiments, treatment results in improvement and/or resolution of one or more symptoms of a disease, disorder or condition.

### Methods of Editing the Genome of a Cell

[0138] In one aspect, the present disclosure provides methods of editing the genome of a cell. In certain embodiments, the method comprises contacting the cell with a nuclease that causes a break within an endogenous coding sequence of an essential gene in the cell wherein the essential gene encodes at least one gene product that is required for survival, proliferation, and/or development of the cell. The cell is also contacted with (i) a donor template that comprises a knock-in cassette comprising an exogenous coding sequence for a gene product of interest in frame with and downstream (3′) of an exogenous coding sequence or partial coding sequence of the essential gene (FIG. 3B) and/or (ii) a donor template that comprises a knock-in cassette comprising an exogenous coding sequence for a gene product of interest in frame with and upstream (5′) of an exogenous coding sequence or partial coding sequence of the essential gene (FIG. 3D). The knock-in cassette is integrated into the genome of the cell by homology-directed repair (HDR) of the break, resulting in a genome-edited cell that expresses the gene product of interest and the gene product encoded by the essential gene that is required for survival, proliferation, and/or development of the cell, or a functional variant thereof. The genetically modified “knock-in” cell survives and proliferates to produce progeny cells with genomes that also include the exogenous coding sequence for the gene product of interest. This is illustrated in FIG. 3A for an exemplary method.

[0139] If the knock-in cassette is not properly integrated into the genome of the cell, undesired editing events that result from the break, e.g., NHEJ-mediated creation of indels, may produce a non-functional, e.g., out of frame, version of the essential gene. This produces a “knock-out” cell when the editing efficiency of the nuclease is high enough to disrupt both alleles. In certain embodiments, this produces a “knock-out” cell when the editing efficiency of the nuclease is high enough to disrupt one allele. Without sufficient functional copies of the essential gene these “knock-out” cells are unable to survive and do not produce any progeny cells.

[0140] Since the “knock-in” cells survive and the “knock-out” cells do not survive, the method automatically selects for the “knock-in” cells when it is applied to a population of starting cells. Significantly, in certain embodiments, the method does not require high knock-in efficiencies because of this automatic selection aspect. It is therefore particularly suitable for methods where the donor template is a dsDNA (e.g., a plasmid) where knock-in efficiencies are often below 5%. As noted in the exemplary method of FIG. 3C, in some embodiments some of the cells in the population of starting cells may remain unedited, i.e., unaffected by the nuclease. These cells would also survive and produce progeny with genomes that do not include the exogenous coding sequence for the gene product of interest. When the nuclease editing efficiency is high, e.g., about 60-90%, or higher the percentage of unedited cells will be relatively low as compared to the percentage of genetically modified cells. In some embodiments, high nuclease editing efficiencies (e.g., greater than 65%, greater than 70%, greater than 75%, greater than 80%, greater than 85%, greater than 90%, or greater than 95%) facilitates efficient population wide transgene integration, as the percentage of unedited cells will be relatively low as compared to the percentage of genetically modified cells. In some embodiments of the methods disclosed herein, at least about 65% of the cells (e.g., about 70%, about 75%, about 80%, about 85%, about 90%, about 91%, about 92%, about 93%, about 94%, about 95%, about 96%, about 97%, about 98%, or about 99% of the cells) are edited by a nuclease, e.g., an Cas12a or Cas9. In some embodiments, an RNP containing a CRISPR nuclease (e.g., Cas9 or Cas12a) and a guide are capable of cleaving the locus of an essential gene (e.g., a terminal exon in the locus of any essential gene provided in Table 3) in at least 65% of the cells in a population of cells (e.g., at least 65%, at least 70%, at least 75%, at least 80%, at least 85%, at least 90%, at least 91%, at least 92%, at least 93%, at least 94%, at least 95%, at least 96%, at least 97%, at least 98%, or at least 99% of the cells in a population of cells). In some embodiments, editing efficiency is determined prior to target cell die off, e.g., at day 1 and/or day 2 post transfection or transduction. In some embodiments, editing efficiency measured at day 1 and/or day 2 post transfection or transduction may not capture the complete proportion of cells for which editing occurred, as in some embodiments, certain editing events may result in near immediate and/or swift cell death. In some embodiments, near immediate and/or swift cell death may be any period of time less than 48 hours post transfection or transduction, for example, less than 48 hours, less than 44 hours, less than 40 hours, less than 36 hours, less than 32 hours, less than 28 hours, less than 24 hours, less than 20 hours, less than 16 hours, less than 15 hours, less than 14 hours, less than 13 hours, less than 12 hours, less than 11 hours, less than 10 hours, less than 9 hours, less than 8 hours, less than 7 hours, less than 6 hours, less than 5 hours, less than 4 hours, less than 3 hours, less than 2 hours, or less than 1 hour after transfection or transduction.

[0141] In some embodiments, the nuclease causes a double-strand break. In some embodiments the nuclease causes a single-strand break, e.g., in some embodiments the nuclease is a nickase. In some embodiments the nuclease is a prime editor which comprises a nickase domain fused to a reverse transcriptase domain. In some embodiments the nuclease is an RNA-guided prime editor and the gRNA comprises the donor template. In some embodiments a dual-nickase system is used which causes a double-strand break via two single-strand breaks on opposing strands of a double-stranded DNA, e.g., genomic DNA of the cell.

[0142] In some embodiments, the present disclosure provides methods suitable for high-efficiency knock-in (e.g., a high proportion of a cell population comprises a knock-in allele), overcoming a major manufacturing challenge. Historically, gene of interest knock-in using plasmid vectors results in efficiencies typically between 0.1 and 5% (see e.g., Zhu et al., CRISPR/Cas-Mediated Selection-free Knockin Strategy in Human Embryonic Stem Cells. Stem Cell Reports. 2015; 4(6):1103-1111). This low knock-in efficiency can result in a need for extensive time and resources devoted to screening potentially edited clones. Additionally, gene of interest knock-in into B cells, particularly primary human B cells, has been notably inefficient even when using viral vectors as compared to other cell types—with knock-in efficiencies averaging between 10 and 25% (see e.g., Johnson et al., Engineering of Primary Human B cells with CRISPR/Cas9 Targeted Nuclease. Sci. Rep. 2018; 8(1):12144). Efficiencies seen with the usage of other template types (e.g., ssODNs) are further reduced (see e.g., Wu et al., Genetic engineering in primary human B cells with CRISPR-Cas9 ribonucleoproteins. J Immunol Methods. 2018; 457:33-40).

[0143] In some embodiments, a gene of interest knocked into a cell may have a role in effector function, specificity, stealth, persistence, homing/chemotaxis, and/or resistance to certain chemicals (see for example, Saetersmoen et al., Seminars in Immunopathology, 2019).

[0144] In certain embodiments, the present disclosure provides methods for creation of knock-in cells that maintain high levels of expression regardless of age, differentiation status, and/or exogenous conditions. For example, in some embodiments, an integrated cargo is expressed at an optimal level with a desired subcellular localization as a function of an insertion site. In some embodiments, the present disclosure provides such cells.

### Systems for Editing the Genome of a Cell

[0145] In one aspect the present disclosure provides systems for editing the genome of a cell. In some embodiments, the system comprises the cell, a nuclease that causes a break within an endogenous coding sequence of an essential gene of the cell, wherein the essential gene encodes a gene product that is required for survival, proliferation, and/or development of the cell, and a donor template that comprises a knock-in cassette comprising an exogenous coding sequence for a gene product of interest in frame with and downstream (3′) of an exogenous coding sequence or partial coding sequence of the essential gene.

[0146] In some embodiments, the nuclease causes a double-strand break. In some embodiments the nuclease causes a single-strand break, e.g., in some embodiments the nuclease is a nickase. In some embodiments the nuclease is a prime editor which comprises a nickase domain fused to a reverse transcriptase domain. In some embodiments the nuclease is an RNA-guided prime editor and the gRNA comprises the donor template. In some embodiments a dual-nickase system is used which causes a double-strand break via two single-strand breaks on opposing strand of a double-stranded DNA, e.g., genomic DNA of the cell.

[0147] Genome editing systems can be implemented (e.g., administered or delivered to a cell or a subject) in a variety of ways, and different implementations may be suitable for distinct applications. For instance, a genome editing system is implemented, in certain embodiments, as a protein/RNA complex (a ribonucleoprotein, or RNP). In certain embodiments, a genome editing system is implemented as one or more nucleic acids encoding an RNA-guided nuclease and guide RNA components described herein (optionally with one or more additional components); in certain embodiments, a genome editing system is implemented as one or more vectors comprising such nucleic acids, for instance a viral vector such as an adeno-associated virus; and in certain embodiments, a genome editing system is implemented as a combination of any of the foregoing. Additional or modified implementations that operate according to the principles set forth herein will be apparent to the skilled artisan and are within the scope of this disclosure.

[0148] In some embodiments, methods as described herein include performing certain steps in at least duplicate. For example, in some embodiments, integration of certain gene products of interest, particularly including multiple genes of interest or a large number of exogenous gene sequences, may result in an initial selection round that results in a lower than desired level of targeted integration. In certain embodiments, a lower than desirable levels of nuclease activity and/or of knock-in cassette targeted integration may result in a lower than desirable percentage of surviving cells and/or cells comprising the knock-in cassette; this may make identifying a cell with the genetic payload difficult. In some embodiments, to further enrich for the population of edited cells, cells were optionally expanded and then re-edited by providing the pool of edited cells with either both RNP and donor templates (e.g., one or more RNP particles targeting one or more loci, and one or more donor templates designed for targeted integration at one or more loci), or just RNP alone (e.g., one or more RNP that utilize residual donor template).

[0149] In some embodiments, where multiple rounds of RNP and/or donor template editing is performed, enrichment is affected by: i) removing cells that have not incorporated the genetic payload and/or ii) creating more cells with incorporated knock-in cassette. In some embodiments, the effectiveness of an additional enrichment steps, depending on the cargo, depending on whether multiple constructs are used, the target within the essential gene, or other factors, can lead to at least about two-fold, three-fold, four-fold, five-fold, or higher improvement in the percentage of cells incorporating the knock-in cassette from the donor template. In some embodiments, such enrichment can lead to uptake of the “cargo” within the essential gene of mammalian cells of greater than 1%, 2%, 3%, 4%, 5%, 6%, 7%, 8%, 9%, 10%, 15%, 20%, 25%, 30%, 35%, 40%, 45%, 50%, 55%, 60%, 65%, 70%, 75%, 80%, 85%, 90%, or greater than 95%.

[0150] In some embodiments, donor templates (e.g., donor nucleic acid constructs) comprise the transgene flanked by a first homologous region (HR) e.g., a homology arm, and a second HR, e.g., a second homology arm, designed to anneal to a first genomic region (GR) and a second GR within an essential gene of a cell. To be able to anneal, the HRs and GRs need not be perfectly homologous. In some embodiments, examples include a non-inhibitory small number (less than 6 and as few as 1) of mutations in the PAM 5′ of the transgene in the knock-in cassette. In some embodiments, other non-inhibitory changes include codon optimization, wherein unnecessary nucleotides in the wildtype exon are removed from the nucleotide sequence in the knock-in cassette. In some embodiments, other such silent PAM blocking mutations or codon modifications that prevent cleavage of the donor nucleic acid construct by the nuclease are further contemplated. In some embodiments, at least about 90% homology is sufficient for functional annealing for purposes of the examples herein. In some embodiments, the level of homology between the HR and GR is more than 90%, more than 92%, more than 94%, more than 96%, more than 98%, or more than 99%. Other embodiments and the concepts set forth in this paragraph are contemplated and subsumed in the term “essentially homologous.”

### Genetically Modified Cells

[0151] In one aspect the present disclosure provides genetically modified cells or engineered cells including populations of such cells and progeny of such cells.

[0152] In some embodiments, the cell is produced by a method of the present disclosure, e.g., a method that comprises contacting the cell with a nuclease that causes a break within an endogenous coding sequence of an essential gene in the cell wherein the essential gene encodes at least one gene product that is required for survival, proliferation, and/or development of the cell. The cell is also contacted with a donor template that comprises a knock-in cassette comprising an exogenous coding sequence for a gene product of interest in frame with and downstream (3′) of an exogenous coding sequence or partial coding sequence of the essential gene. The knock-in cassette is integrated into the genome of the cell by homology-directed repair (HDR) of the break, resulting in a genome-edited cell that expresses the gene product of interest and the gene product encoded by the essential gene that is required for survival, proliferation, and/or development of the cell, or a functional variant thereof. This is illustrated in FIG. 3 for an exemplary method. In some embodiments, a cell is contacted with a donor template that comprises a knock-in cassette comprising an exogenous coding sequence for a gene product of interest in frame with and upstream (5′) of an exogenous coding sequence or partial coding sequence of the essential gene.

[0153] In some embodiments, the cell comprises a genome with an exogenous coding sequence for a gene product of interest in frame with and downstream (3′) of a coding sequence of an essential gene, wherein the essential gene encodes a gene product that is required for survival, proliferation, and/or development of the cell.

[0154] In some embodiments, the cell comprises a genome with an exogenous coding sequence for a gene product of interest in frame with and upstream (5′) of a coding sequence of an essential gene, wherein the essential gene encodes a gene product that is required for survival, proliferation, and/or development of the cell.

[0155] In some embodiments, the cell comprises a genomic modification, wherein the genomic modification comprises an insertion of an exogenous knock-in cassette within an endogenous coding sequence of an essential gene in the cell's genome, wherein the essential gene encodes a gene product that is required for survival, proliferation, and/or development of the cell, wherein the knock-in cassette comprises an exogenous coding sequence for a gene product of interest in frame with and downstream (3′) of an exogenous coding sequence or partial coding sequence encoding the gene product of the essential gene, or a functional variant thereof, and wherein the cell expresses the gene product of interest and the gene product encoded by the essential gene that is required for survival, proliferation, and/or development of the cell, or a functional variant thereof. In some embodiments, the gene product of interest and the gene product encoded by the essential gene are expressed from the endogenous promoter of the essential gene.

### Donor Template

[0156] In one aspect the present disclosure provides a donor template comprising a knock-in cassette with an exogenous coding sequence for a gene product of interest in frame with and downstream (3′) of an exogenous coding sequence or partial coding sequence of an essential gene, wherein the essential gene encodes a gene product that is required for survival, proliferation, and/or development of the cell.

[0157] In another aspect the present disclosure provides a donor template comprising a knock-in cassette with an exogenous coding sequence for a gene product of interest in frame with and upstream (5′) of an exogenous coding sequence or partial coding sequence of an essential gene, wherein the essential gene encodes a gene product that is required for survival, proliferation, and/or development of the cell.

[0158] In some embodiments, the donor template is for use in editing the genome of a cell by homology-directed repair (HDR).

[0159] Donor template design is described in detail in the literature, for instance in PCT Publication No. WO2016/073990A1. Donor templates can be single-stranded or double-stranded and can be used to facilitate HDR-based repair of double-strand breaks (DSBs), and are particularly useful for inserting a new sequence into the target sequence, or replacing the target sequence altogether. In some embodiments, the donor template is a donor DNA template. In some embodiments the donor DNA template is double-stranded.

[0160] Whether single-stranded or double stranded, donor templates generally include regions that are homologous to regions of DNA within or near (e.g., flanking or adjoining) a target sequence to be cleaved. These homologous regions are referred to herein as “homology arms,” and are illustrated schematically below relative to the knock-in cassette (which may be separated from one or both of the homology arms by additional spacer sequences that are not shown):

[0161] [5′ homology arm]-[knock-in cassette]-[3′ homology arm].

[0162] The homology arms can have any suitable length (including 0 nucleotides if only one homology arm is used), and 5′ and 3′ homology arms can have the same length, or can differ in length. The selection of appropriate homology arm lengths can be influenced by a variety of factors, such as the desire to avoid homologies or microhomologies with certain sequences such as Alu repeats or other very common elements. For example, a 5′ homology arm can be shortened to avoid a sequence repeat element. In other embodiments, a 3′ homology arm can be shortened to avoid a sequence repeat element. In some embodiments, both the 5′ and the 3′ homology arms can be shortened to avoid including certain sequence repeat elements.

[0163] In some embodiments, more than one donor template can be administered to a cell population. In some embodiments, the more than one donor templates are different, for example, each donor template facilitates knock-in of “cargo” sequences encoding different gene products of interest. In some embodiments, the more than one donor templates can be provided at the same time and their payloads incorporated into the same essential gene (e.g., one incorporated at one allele, the other incorporated at the other allele). In some embodiments, this may be particularly advantageous when a particular transgene system and/or gene product of interest has functional sequences that require them to be separated into different alleles of an essential gene. Further, in some embodiments, having multiple copies of gene targets of interest that are different but accomplish a similar goal, e.g., copies of safety switches, can be helpful to assure the functionality and creation of a corresponding phenotype. In some embodiments, more than one copy of a safety switch can ensure elimination of cells when necessary. Further, in some embodiments, certain safety switches require dimerization to function as a suicide switch system (e.g., as described herein). In some embodiments, when more than one donor template is administered to a cell population, such donor templates may be designed to integrate at the same genetic locus, or at different genetic loci.

[0164] A donor template can be a nucleic acid vector, such as a viral genome or circular double-stranded DNA, e.g., a plasmid. Nucleic acid vectors comprising donor templates can include other coding or non-coding elements. For example, a donor template nucleic acid can be delivered as part of a viral genome (e.g., in an AAV, adenoviral, Sendai virus, or lentiviral genome) that includes certain genomic backbone elements (e.g., inverted terminal repeats, in the case of an AAV genome). In some embodiments, a donor template is comprised in a plasmid that has not been linearized. In some embodiments, a donor template is comprised in a plasmid that has been linearized. In some embodiments, a donor template is included within a linear dsDNA fragment. In some embodiments, a donor template nucleic acid can be delivered as part of an AAV genome. In some embodiments, a donor template nucleic acid can be delivered as a single stranded oligo donor (ssODN), for example, as a long multi-kb ssODN derived from m13 phage synthesis, or alternatively, short ssODNs, e.g., that comprise small genes of interest, tags, and/or probes. In some embodiments, a donor template nucleic acid can be delivered as a Doggybone™ DNA (dbDNA™) template. In some embodiments, a donor template nucleic acid can be delivered as a DNA minicircle. In some embodiments, a donor template nucleic acid can be delivered as an Integration-deficient Lentiviral Particle (IDLV). In some embodiments, a donor template nucleic acid can be delivered as a MMLV-derived retrovirus. In some embodiments, a donor template nucleic acid can be delivered as a piggyBac™ sequence. In some embodiments, a donor template nucleic acid can be delivered as a replicating EBNA1 episome.

[0165] In certain embodiments, the 5′ homology arm may be about 25 to about 1,000 base pairs in length, e.g., at least about 100, 200, 400, 600, or 800 base pairs in length. In certain embodiments, the 5′ homology arm comprises about 50 to 800 base pairs, e.g., 100 to 800, 200 to 800, 400 to 800, 400 to 600, or 600 to 800 base pairs. In certain embodiments, the 3′ homology arm may be about 25 to about 1,000 base pairs in length, e.g., at least about 100, 200, 400, 600, or 800 base pairs in length. In certain embodiments, the 3′ homology arm comprises about 50 to 800 base pairs, e.g., 100 to 800, 200 to 800, 400 to 800, 400 to 600, or 600 to 800 base pairs. In certain embodiments, the 5′ and 3′ homology arms are symmetrical in length. In certain embodiments, the 5′ and 3′ homology arms are asymmetrical in length.

[0166] In certain embodiments, a 5′ homology arm is less than about 3,000 base pairs, less than about 2,900 base pairs, less than about 2,800 base pairs, less than about 2,700 base pairs, less than about 2,600 base pairs, less than about 2,500 base pairs, less than about 2,400 base pairs, less than about 2,300 base pairs, less than about 2,200 base pairs, less than about 2,100 base pairs, less than about 2,000 base pairs, less than about 1,900 base pairs, less than about 1,800 base pairs, less than about 1,700 base pairs, less than about 1,600 base pairs, less than about 1,500 base pairs, less than about 1,400 base pairs, less than about 1,300 base pairs, less than about 1,200 base pairs, less than about 1,100 base pairs, less than about 1,000 base pairs, less than about 900 base pairs, less than about 800 base pairs, less than about 700 base pairs, less than about 600 base pairs, less than about 500 base pairs, or less than about 400 base pairs.

[0167] In certain embodiments, e.g., where a viral vector is utilized to introduce a knock-in cassette through a method described herein, a 5′ homology arm is less than about 1,000 base pairs, less than about 900 base pairs, less than about 800 base pairs, is less than about 700 base pairs, less than about 600 base pairs, less than about 500 base pairs, less than about 400 base pairs, or less than about 300 base pairs. In certain embodiments, e.g., where a viral vector is utilized to introduce a knock-in cassette through a method described herein, a 5′ homology arm is about 400-600 base pairs, e.g., about 500 base pairs.

[0168] In certain embodiments, a 3′ homology arm is less than about 3,000 base pairs, less than about 2,900 base pairs, less than about 2,800 base pairs, less than about 2,700 base pairs, less than about 2,600 base pairs, less than about 2,500 base pairs, less than about 2,400 base pairs, less than about 2,300 base pairs, less than about 2,200 base pairs, less than about 2,100 base pairs, less than about 2,000 base pairs, less than about 1,900 base pairs, less than about 1,800 base pairs, less than about 1,700 base pairs, less than about 1,600 base pairs, less than about 1,500 base pairs, less than about 1,400 base pairs, less than about 1,300 base pairs, less than about 1,200 base pairs, less than about 1,100 base pairs, less than 1,000 base pairs, less than about 900 base pairs, less than about 800 base pairs, less than about 700 base pairs, less than about 600 base pairs, less than about 500 base pairs, or less than about 400 base pairs.

[0169] In certain embodiments, e.g., where a viral vector is utilized to introduce a knock-in cassette through a method described herein, a 3′ homology arm is less than about 1,000 base pairs, less than about 900 base pairs, less than about 800 base pairs, less than about 700 base pairs, less than about 600 base pairs, less than about 500 base pairs, less than about 400 base pairs, or less than about 300 base pairs. In certain embodiments, e.g., where a viral vector is utilized to introduce a knock-in cassette through a method described herein, a 3′ homology arm is about 400-600 base pairs, e.g., about 500 base pairs.

[0170] In certain embodiments, the 5′ and 3′ homology arms flank the break and are less than 100, 75, 50, 25, 15, 10 or 5 base pairs away from an edge of the break. In certain embodiments, the 5′ and 3′ homology arms flank an endogenous stop codon. In certain embodiments, the 5′ and 3′ homology arms flank a break located within about 500 base pairs (e.g., about 500 base pairs, about 450 base pairs, about 400 base pairs, about 350 base pairs, about 300 base pairs, about 250 base pairs, about 200 base pairs, about 150 base pairs, about 100 base pairs, about 50 base pairs, or about 25 base pairs) upstream (5′) of an endogenous stop codon, e.g., the stop codon of an essential gene. In certain embodiments, the 5′ homology arm encompasses an edge of the break.

[0171] Certain donor templates are also described in, e.g., WO2021/226151 and/or WO2022/272292, each of which is herein incorporated by reference in its entirety.

### Knock-In Cassette

[0172] In some embodiments, a knock-in cassette within the donor template comprises an exogenous coding sequence for the gene product of interest in frame with and downstream (3′) of an exogenous coding sequence or partial coding sequence of the essential gene. In some embodiments, a knock-in cassette within a donor template comprises an exogenous coding sequence for the gene product of interest in frame with and upstream (5′) of an exogenous coding sequence or partial coding sequence of an essential gene. In some embodiments, the knock-in cassette is a polycistronic knock-in cassette. In some embodiments, the knock-in cassette is a bicistronic knock-in cassette. In some embodiment the knock-in cassette does not comprise a reporter gene, e.g., a fluorescent reporter gene or an antibiotic resistance gene.

[0173] In some embodiments, a single essential gene locus will be targeted by two knock-in cassettes comprising different “cargo” sequences. In some embodiments, one allele will incorporate one knock-in cassette, while the other allele will incorporate the other knock-in cassette. In some embodiments, a gRNA utilized to generate an appropriate DNA break may be the same for each of the two different knock-in cassettes. In some embodiments, gRNAs utilized to generate appropriate DNA breaks for each of the two different knock-in cassettes may be different, such that the “cargo” sequence is incorporated at a different position for each allele. In some embodiments, such a different position for each allele may still be within the ultimate exons coding region. In some embodiments, such a different position for each allele may be within the penultimate exon (second to last), and/or ultimate (last) exons coding region. In some embodiments, such a different position for at least one of the alleles may be within the first exon. In some embodiments, such a different position for at least one of the alleles may be within the first or second exon.

[0174] In order to properly restore the essential gene coding region in the genetically modified cell (so that a functioning gene product is produced) the knock-in cassette does not need to comprise an exogenous coding sequence that corresponds to the entire coding sequence of the essential gene. Indeed, depending on the location of the break in the endogenous coding sequence of the essential gene it may be possible to restore the essential gene by providing a knock-in cassette that comprises a partial coding sequence of the essential gene, e.g., that corresponds to a portion of the endogenous coding sequence of the essential gene that spans the break and the entire region downstream of the break (minus the stop codon), and/or that corresponds to a portion of the endogenous coding sequence of the essential gene that spans the break and the entire region upstream of the break (up to and optionally including the start codon).

[0175] In order to minimize the size of the knock-in cassette it may in fact be advantageous, in some embodiments, to have the break located within the last 1500, 1000, 750, 500, 400, 300, 200, 100, or 50 base pairs of the endogenous coding sequence of the essential gene, i.e., towards the 3′ end of the coding sequence. In some embodiments, a base pair's location in a coding sequence may be defined 3′-to-5′ from an endogenous translational stop signal (e.g., a stop codon). In some embodiments, as used herein, an “endogenous coding sequence” can include both exonic and intronic base pairs, and refers to gene sequence occurring 5′ to an endogenous functional translational stop signal. In some embodiments, a break within an endogenous coding sequence comprises a break within one DNA strand. In some embodiments, a break within an endogenous coding sequence comprises a break within both DNA strands. In some embodiments, a break is located within the last 1000 base pairs of the endogenous coding sequence. In some embodiments, a break is located within the last 750 base pairs of the endogenous coding sequence. In some embodiments, a break is located within the last 600 base pairs of the endogenous coding sequence. In some embodiments, a break is located within the last 500 base pairs of the endogenous coding sequence. In some embodiments, a break is located within the last 400 base pairs of the endogenous coding sequence. In some embodiments, a break is located within the last 300 base pairs of the endogenous coding sequence. In some embodiments, a break is located within the last 250 base pairs of the endogenous coding sequence. In some embodiments, a break is located within the last 200 base pairs of the endogenous coding sequence. In some embodiments, a break is located within the last 150 base pairs of the endogenous coding sequence. In some embodiments, a break is located within the last 100 base pairs of the endogenous coding sequence. In some embodiments, a break is located within the last 75 base pairs of the endogenous coding sequence. In some embodiments, a break is located within the last 50 base pairs of the endogenous coding sequence. In some embodiments, a break is located within the last 21 base pairs of the endogenous coding sequence.

[0176] In some embodiments, the exogenous partial coding sequence of the essential gene in the knock-in cassette encodes a C-terminal fragment of a protein encoded by the essential gene, e.g., a fragment that is less than 500, 250, 150, 125, 100, 75, 50, 25, 20, 15 or 10 amino acids in length. In some embodiments, the exogenous partial coding sequence of the essential gene in the knock-in cassette is codon optimized. In some embodiments, the exogenous partial coding sequence of the essential gene in the knock-in cassette is codon optimized to eliminate at least one PAM site. In some embodiments, the exogenous partial coding sequence of the essential gene in the knock-in cassette is codon optimized to eliminate more than one PAM site. In some embodiments, the exogenous partial coding sequence of the essential gene in the knock-in cassette is codon optimized to eliminate all relevant nuclease specific PAM sites. In some embodiments, a C-terminal fragment of a protein encoded by the essential gene is about 140 amino acids in length. In some embodiments, a C-terminal fragment of a protein encoded by the essential gene is about 130 amino acids in length. In some embodiments, a C-terminal fragment of a protein encoded by the essential gene is about 120 amino acids in length. In some embodiments, the C-terminal fragment includes an amino acid sequence that is encoded by a region of the endogenous coding sequence of the essential gene that spans the break. In some embodiments, a C-terminal fragment includes an amino acid sequence that is encoded by a region of the endogenous coding sequence within 1 exon of the essential gene. In some embodiments, a C-terminal fragment includes an amino acid sequence that is encoded by a region of the endogenous coding sequence within 2 exons of the essential gene. In some embodiments, a C-terminal fragment includes an amino acid sequence that is encoded by a region of the endogenous coding sequence within 3 exons of the essential gene. In some embodiments, a C-terminal fragment includes an amino acid sequence that is encoded by a region of the endogenous coding sequence within 4 exons of the essential gene. In some embodiments, a C-terminal fragment includes an amino acid sequence that is encoded by a region of the endogenous coding sequence within 5 exons of the essential gene.

[0177] In some embodiments, the exogenous partial coding sequence of an essential gene in a knock-in cassette encodes a C-terminal fragment of a protein encoded by an essential gene, e.g., a fragment that is less than 500, 250, 150, 125, 100, 75, 50, 25, 20, 19, 18, 17, 16, 15, 14, 13, 12, 11, 10, 9, 8, or 7 amino acids in length. In some embodiments, the exogenous partial coding sequence of an essential gene in a knock-in cassette encodes a 20 amino acid C-terminal fragment of a protein encoded by an essential gene. In some embodiments, the exogenous partial coding sequence of an essential gene in a knock-in cassette encodes a 19 amino acid C-terminal fragment of a protein encoded by an essential gene. In some embodiments, the exogenous partial coding sequence of an essential gene in a knock-in cassette encodes an 18 amino acid C-terminal fragment of a protein encoded by an essential gene. In some embodiments, the exogenous partial coding sequence of an essential gene in a knock-in cassette encodes a 17 amino acid C-terminal fragment of a protein encoded by an essential gene. In some embodiments, the exogenous partial coding sequence of an essential gene in a knock-in cassette encodes a 16 amino acid C-terminal fragment of a protein encoded by an essential gene. In some embodiments, the exogenous partial coding sequence of an essential gene in a knock-in cassette encodes a 1 amino acid C-terminal fragment of a protein encoded by an essential gene.

[0178] In some embodiments, e.g., when the essential gene includes many exons as shown in the exemplary method of FIG. 3A, it may be advantageous to have the break within the last exon of the essential gene. In some embodiments, e.g., when the essential gene includes many exons as shown in the exemplary method of FIG. 3A, it may be advantageous to have the break within the penultimate exon of the essential gene. It is to be understood however that the present disclosure is not limited to any particular location for the break and that the available positions will vary depending on the nature and length of the essential gene and the length of the exogenous coding sequence for the gene product of interest. For example, for essential genes that include a few exons or when the gene product of interest is small it may be possible to locate the break in an upstream exon.

[0179] In order to minimize the size of the knock-in cassette it may in fact be advantageous, in some embodiments, to have the break located within the first 1500, 1000, 750, 500, 400, 300, 200, 100, or 50 base pairs of an endogenous coding sequence of the essential gene, i.e., starting from the 5′ end of a coding sequence. In some embodiments, a base pair's location in a coding sequence may be defined 5′-to-3′ from an endogenous translational start signal (e.g., a start codon). In some embodiments, as used herein, an “endogenous coding sequence” can include both exonic and intronic base pairs, and refers to gene sequence occurring 3′ to an endogenous functional translational start signal. In some embodiments, a break within an endogenous coding sequence comprises a break within one DNA strand. In some embodiments, a break within an endogenous coding sequence comprises a break within both DNA strands. In some embodiments, a break is located within the first 1000 base pairs of the endogenous coding sequence. In some embodiments, a break is located within the first 750 base pairs of an endogenous coding sequence. In some embodiments, a break is located within the first 600 base pairs of the endogenous coding sequence. In some embodiments, a break is located within the first 500 base pairs of the endogenous coding sequence. In some embodiments, a break is located within the first 400 base pairs of the endogenous coding sequence. In some embodiments, a break is located within the first 300 base pairs of the endogenous coding sequence. In some embodiments, a break is located within the first 250 base pairs of the endogenous coding sequence. In some embodiments, a break is located within the first 200 base pairs of the endogenous coding sequence. In some embodiments, a break is located within the first 150 base pairs of the endogenous coding sequence. In some embodiments, a break is located within the first 100 base pairs of the endogenous coding sequence. In some embodiments, a break is located within the first 75 base pairs of the endogenous coding sequence. In some embodiments, a break is located within the first 50 base pairs of the endogenous coding sequence. In some embodiments, a break is located within the first 21 base pairs of the endogenous coding sequence.

[0180] In some embodiments, the exogenous partial coding sequence of the essential gene in the knock-in cassette encodes an N-terminal fragment of a protein encoded by the essential gene, e.g., a fragment that is less than 500, 250, 150, 125, 100, 75, 50, 25, 20, 15 or 10 amino acids in length. In some embodiments, an N-terminal fragment of a protein encoded by the essential gene is about 140 amino acids in length. In some embodiments, an N-terminal fragment of a protein encoded by the essential gene is about 130 amino acids in length. In some embodiments, an N-terminal fragment of a protein encoded by the essential gene is about 120 amino acids in length. In some embodiments, an N-terminal fragment includes an amino acid sequence that is encoded by a region of the endogenous coding sequence of the essential gene that spans the break. In some embodiments, an N-terminal fragment includes an amino acid sequence that is encoded by a region of the endogenous coding sequence within 1 exon of the essential gene. In some embodiments, an N-terminal fragment includes an amino acid sequence that is encoded by a region of the endogenous coding sequence within 2 exons of the essential gene. In some embodiments, an N-terminal fragment includes an amino acid sequence that is encoded by a region of the endogenous coding sequence within 3 exons of the essential gene. In some embodiments, an N-terminal fragment includes an amino acid sequence that is encoded by a region of the endogenous coding sequence within 4 exons of the essential gene. In some embodiments, an N-terminal fragment includes an amino acid sequence that is encoded by a region of the endogenous coding sequence within 5 exons of the essential gene.

[0181] In some embodiments, the exogenous partial coding sequence of an essential gene in a knock-in cassette encodes an N-terminal fragment of a protein encoded by an essential gene, e.g., a fragment that is less than 500, 250, 150, 125, 100, 75, 50, 25, 20, 19, 18, 17, 16, 15, 14, 13, 12, 11, 10, 9, 8, or 7 amino acids in length. In some embodiments, the exogenous partial coding sequence of an essential gene in a knock-in cassette encodes a 20 amino acid N-terminal fragment of a protein encoded by an essential gene. In some embodiments, the exogenous partial coding sequence of an essential gene in a knock-in cassette encodes a 19 amino acid N-terminal fragment of a protein encoded by an essential gene. In some embodiments, the exogenous partial coding sequence of an essential gene in a knock-in cassette encodes an 18 amino acid N-terminal fragment of a protein encoded by an essential gene. In some embodiments, the exogenous partial coding sequence of an essential gene in a knock-in cassette encodes a 17 amino acid N-terminal fragment of a protein encoded by an essential gene. In some embodiments, the exogenous partial coding sequence of an essential gene in a knock-in cassette encodes a 16 amino acid N-terminal fragment of a protein encoded by an essential gene. In some embodiments, the exogenous partial coding sequence of an essential gene in a knock-in cassette encodes a 1 amino acid N-terminal fragment of a protein encoded by an essential gene.

[0182] In some embodiments, the exogenous coding sequence or partial coding sequence of the essential gene in the knock-in cassette is less than 100% identical to the corresponding endogenous coding sequence of the essential gene of the cell, e.g., less than 99%, 98%, 97%, 96%, 95%, 94%, 93%, 92%, 91%, 90%, 85%, 80%, 75%, 70%, 65%, 60%, 55% or less than 50% (i.e., when the two sequences are aligned using a standard pairwise sequence alignment tool that maximizes the alignment between the corresponding sequences). For example, in some embodiments, the exogenous coding sequence or partial coding sequence of the essential gene in the knock-in cassette is codon optimized relative to the corresponding endogenous coding sequence of the essential gene of the cell, e.g., to prevent further binding of a nuclease to the target site. Alternatively or additionally it may be codon optimized to reduce the likelihood of recombination after integration of the knock-in cassette into the genome of the cell and/or to increase expression of the gene product of the essential gene and/or the gene product of interest after integration of the knock-in cassette into the genome of the cell.

[0183] In some embodiments, a knock-in cassette comprises one or more nucleotides or base pairs that differ (e.g., are mutations) relative to an endogenous knock-in site. In some embodiments, such mutations in a knock-in cassette provide resistance to cutting by a nuclease. In some embodiments, such mutations in a knock-in cassette prevent a nuclease from cutting the target loci following homologous recombination. In some embodiments, such mutations in a knock-in cassette occur within one or more coding and/or non-coding regions of a target gene. In some embodiments, such mutations in a knock-in cassette are silent mutations. In some embodiments, such mutations in a knock-in cassette are silent and/or missense mutations.

[0184] In some embodiments, such mutations in a knock-in cassette occur within a target protospacer motif and/or a target protospacer adjacent motif (PAM) site. In some embodiments, a knock-in cassette includes a target protospacer motif and/or a PAM site that are saturated with silent mutations. In some embodiments, a knock-in cassette includes a target protospacer motif and/or a PAM site that are approximately 30%, 40%, 50%, 60%, 70%, 80%, or 90% saturated with silent mutations. In some embodiments, a knock-in cassette includes a target protospacer motif and/or a PAM site that are saturated with silent and/or missense mutations. In some embodiments, a knock-in cassette includes a target protospacer motif and/or a PAM site that comprise at least one mutation, at least 2 mutations, at least 3 mutations, at least 4 mutations, at least 5 mutations, at least 6 mutations, at least 7 mutations, at least 8 mutations, at least 9 mutations, at least 10 mutations, at least 11 mutations, at least 12 mutations, at least 13 mutations, at least 14 mutations, or at least 15 mutations.

[0185] In some embodiments, certain codons encoding certain amino acids in a target site cannot be mutated through codon-optimization without losing some portion of an endogenous proteins natural function. In some embodiments, certain codons encoding certain amino acids in a target site cannot be mutated through codon-optimization.

[0186] In some embodiments, the knock-in cassette is codon optimized in only a portion of the coding sequence. For example, in some embodiments, a knock-in cassette encodes a C-terminal fragment of a protein encoded by an essential gene, e.g., a fragment that is less than 500, 250, 150, 125, 100, 75, 50, 25, 20, 19, 18, 17, 16, 15, 14, 13, 12, 11, 10, 9, 8, or 7 amino acids in length. In some embodiments, the exogenous partial coding sequence of an essential gene in a knock-in cassette that has been codon optimized encodes a 20 amino acid C-terminal fragment of a protein encoded by an essential gene. In some embodiments, the exogenous partial coding sequence of an essential gene in a knock-in cassette that has been codon optimized encodes a 19 amino acid C-terminal fragment of a protein encoded by an essential gene. In some embodiments, the exogenous partial coding sequence of an essential gene in a knock-in cassette that has been codon optimized encodes an 18 amino acid C-terminal fragment of a protein encoded by an essential gene. In some embodiments, the exogenous partial coding sequence of an essential gene in a knock-in cassette that has been codon optimized encodes a 17 amino acid C-terminal fragment of a protein encoded by an essential gene. In some embodiments, the exogenous partial coding sequence of an essential gene in a knock-in cassette that has been codon optimized encodes a 16 amino acid C-terminal fragment of a protein encoded by an essential gene. In some embodiments, the exogenous partial coding sequence of an essential gene in a knock-in cassette that has been codon optimized encodes a 15 amino acid C-terminal fragment of a protein encoded by an essential gene. In some embodiments, the exogenous partial coding sequence of an essential gene in a knock-in cassette that has been codon optimized encodes a 14 amino acid C-terminal fragment of a protein encoded by an essential gene. In some embodiments, the exogenous partial coding sequence of an essential gene in a knock-in cassette that has been codon optimized encodes a 13 amino acid C-terminal fragment of a protein encoded by an essential gene. In some embodiments, the exogenous partial coding sequence of an essential gene in a knock-in cassette that has been codon optimized encodes a 12 amino acid C-terminal fragment of a protein encoded by an essential gene. In some embodiments, the exogenous partial coding sequence of an essential gene in a knock-in cassette that has been codon optimized encodes a 11 amino acid C-terminal fragment of a protein encoded by an essential gene. In some embodiments, the exogenous partial coding sequence of an essential gene in a knock-in cassette that has been codon optimized encodes a 10 amino acid C-terminal fragment of a protein encoded by an essential gene. In some embodiments, the exogenous partial coding sequence of an essential gene in a knock-in cassette that has been codon optimized encodes a 9 amino acid C-terminal fragment of a protein encoded by an essential gene. In some embodiments, the exogenous partial coding sequence of an essential gene in a knock-in cassette that has been codon optimized encodes an 8 amino acid C-terminal fragment of a protein encoded by an essential gene. In some embodiments, the exogenous partial coding sequence of an essential gene in a knock-in cassette that has been codon optimized encodes a 7 amino acid C-terminal fragment of a protein encoded by an essential gene. In some embodiments, the exogenous partial coding sequence of an essential gene in a knock-in cassette that has been codon optimized encodes a 6 amino acid C-terminal fragment of a protein encoded by an essential gene. In some embodiments, the exogenous partial coding sequence of an essential gene in a knock-in cassette that has been codon optimized encodes a 5 amino acid C-terminal fragment of a protein encoded by an essential gene. In some embodiments, the exogenous partial coding sequence of an essential gene in a knock-in cassette that has been codon optimized encodes an amino acid C-terminal fragment that is less than 5 amino acids of a protein encoded by an essential gene.

[0187] In some embodiments, the knock-in cassette is codon optimized in only a portion of the coding sequence. For example, in some embodiments, a knock-in cassette encodes an N-terminal fragment of a protein encoded by an essential gene, e.g., a fragment that is less than 500, 250, 150, 125, 100, 75, 50, 25, 20, 19, 18, 17, 16, 15, 14, 13, 12, 11, 10, 9, 8, or 7 amino acids in length. In some embodiments, the exogenous partial coding sequence of an essential gene in a knock-in cassette that has been codon optimized encodes a 20 amino acid N-terminal fragment of a protein encoded by an essential gene. In some embodiments, the exogenous partial coding sequence of an essential gene in a knock-in cassette that has been codon optimized encodes a 19 amino acid N-terminal fragment of a protein encoded by an essential gene. In some embodiments, the exogenous partial coding sequence of an essential gene in a knock-in cassette that has been codon optimized encodes an 18 amino acid N-terminal fragment of a protein encoded by an essential gene. In some embodiments, the exogenous partial coding sequence of an essential gene in a knock-in cassette that has been codon optimized encodes a 17 amino acid N-terminal fragment of a protein encoded by an essential gene. In some embodiments, the exogenous partial coding sequence of an essential gene in a knock-in cassette that has been codon optimized encodes a 16 amino acid N-terminal fragment of a protein encoded by an essential gene. In some embodiments, the exogenous partial coding sequence of an essential gene in a knock-in cassette that has been codon optimized encodes a 15 amino acid N-terminal fragment of a protein encoded by an essential gene. In some embodiments, the exogenous partial coding sequence of an essential gene in a knock-in cassette that has been codon optimized encodes a 14 amino acid N-terminal fragment of a protein encoded by an essential gene. In some embodiments, the exogenous partial coding sequence of an essential gene in a knock-in cassette that has been codon optimized encodes a 13 amino acid N-terminal fragment of a protein encoded by an essential gene. In some embodiments, the exogenous partial coding sequence of an essential gene in a knock-in cassette that has been codon optimized encodes a 12 amino acid N-terminal fragment of a protein encoded by an essential gene. In some embodiments, the exogenous partial coding sequence of an essential gene in a knock-in cassette that has been codon optimized encodes a 11 amino acid N-terminal fragment of a protein encoded by an essential gene. In some embodiments, the exogenous partial coding sequence of an essential gene in a knock-in cassette that has been codon optimized encodes a 10 amino acid N-terminal fragment of a protein encoded by an essential gene. In some embodiments, the exogenous partial coding sequence of an essential gene in a knock-in cassette that has been codon optimized encodes a 9 amino acid N-terminal fragment of a protein encoded by an essential gene. In some embodiments, the exogenous partial coding sequence of an essential gene in a knock-in cassette that has been codon optimized encodes an 8 amino acid N-terminal fragment of a protein encoded by an essential gene. In some embodiments, the exogenous partial coding sequence of an essential gene in a knock-in cassette that has been codon optimized encodes a 7 amino acid N-terminal fragment of a protein encoded by an essential gene. In some embodiments, the exogenous partial coding sequence of an essential gene in a knock-in cassette that has been codon optimized encodes a 6 amino acid N-terminal fragment of a protein encoded by an essential gene. In some embodiments, the exogenous partial coding sequence of an essential gene in a knock-in cassette that has been codon optimized encodes a 5 amino acid N-terminal fragment of a protein encoded by an essential gene. In some embodiments, the exogenous partial coding sequence of an essential gene in a knock-in cassette that has been codon optimized encodes an amino acid N-terminal fragment that is less than 5 amino acids of a protein encoded by an essential gene.

[0188] In some embodiments, the knock-in cassette comprises one or more sequences encoding a linker peptide, e.g., between an exogenous coding sequence or partial coding sequence of the essential gene and a “cargo” sequence and/or a regulatory element described herein. Such linker peptides are known in the art, any of which can be included in a knock-in cassette described herein. In some embodiments, the linker peptide comprises the amino acid sequence GSG.

[0189] In some embodiments, the knock-in cassette comprises other regulatory elements such as a polyadenylation sequence, and optionally a 3′ UTR sequence, downstream of the exogenous coding sequence for the gene product of interest. If a 3′UTR sequence is present, the 3′UTR sequence is positioned 3′ of the exogenous coding sequence and 5′ of the polyadenylation sequence.

[0190] In some embodiments, the knock-in cassette comprises other regulatory elements such as a 5′ UTR and a start codon, upstream of the exogenous coding sequence for the gene product of interest. If a 5′UTR sequence is present, the 5′UTR sequence is positioned 5′ of the “cargo” sequence and/or exogenous coding sequence.

[0191] Certain knock-in cassettes are also described in, e.g., WO2021/226151 and/or WO2022/272292, each of which is herein incorporated by reference in its entirety.

### Exemplary Homology Arms (HA)

[0192] In certain embodiments, a donor template comprises a 5′ and/or 3′ homology arm homologous to region of a GAPDH locus. In some embodiments, a donor template comprises a 5′ homology arm comprising or consisting of the sequence of SEQ ID NO:1, 2, or 3. In some embodiments, a 5′ homology arm comprises or consists of a sequence that is at least 85%, 90%, 95%, 98% or 99% identical to the sequence of SEQ ID NO: 1, 2, or 3. In some embodiments, a donor template comprises a 3′ homology arm comprising or consisting of the sequence of SEQ ID NO:4 or 5. In certain embodiments, a 3′ homology arm comprises or consists of a sequence that is at least 85%, 90%, 95%, 98% or 99% identical to the sequence of SEQ ID NO: 4 or 5.

[0193] In some embodiments, a donor template comprises a 5′ homology arm comprising SEQ ID NO: 1, and a 3′ homology arm comprising SEQ ID NO: 4. In some embodiments, a donor template comprises a 5′ homology arm comprising SEQ ID NO: 2, and a 3′ homology arm comprising SEQ ID NO: 4. In some embodiments, a donor template comprises a 5′ homology arm comprising SEQ ID NO: 3, and a 3′ homology arm comprising SEQ ID NO:5.

[0194] In some embodiments, a stretch of sequence flanking a nuclease cleavage site may be duplicated in both a 5′ and 3′ homology arm. In some embodiments, such a duplication is designed to optimize HDR efficiency. In some embodiments, one of the duplicated sequences may be codon optimized, while the other sequence is not codon optimized. In some embodiments, both of the duplicated sequences may be codon optimized. In some embodiments, codon optimization may remove a target PAM site. In some embodiments, a duplicated sequence may be no more than: 100 bp in length, 90 bp in length, 80 bp in length, 70 bp in length, 60 bp in length, 50 bp in length, 40 bp in length, 30 bp in length, or 20 bp in length.

exemplary 5′ HA for knock-in cassette insertion at GAPDH locus
SEQ ID NO: 1
GAAGACTGTGGATGGCCCCTCCGGGAAACTGTGGCGTGATGGCCGCGGGGCTCTCCAGAACATC
ATCCCTGCCTCTACTGGCGCTGCCAAGGCTGTGGGCAAGGTCATCCCTGAGCTGAACGGGAAGC
TCACTGGCATGGCCTTCCGTGTCCCCACTGCCAACGTGTCAGTGGTGGACCTGACCTGCCGTCT
AGAAAAACCTGCCAAATATGATGACATCAAGAAGGTGGTGAAGCAGGCGTCGGAGGGCCCCCTC
AAGGGCATCCTGGGCTACACTGAGCACCAGGTGGTCTCCTCTGACTTCAACAGCGACACCCACT
CCTCCACCTTTGACGCTGGGGCTGGCATTGCCCTCAACGACCACTTTGTCAAGCTCATTTCCTG
GTATGTGGCTGGGGCCAGAGACTGGCTCTTAAAAAGTGCAGGGTCTGGCGCCCTCTGGTGGCTG
GCTCAGAAAAAGGGCCCTGACAACTCTTTACATCTTCTAGGTATGACAACGAGTTCGGATATAG
CAATAGAGTGGTCGATCTGATGGCTCATATGGCTAGCAAAGAG
exemplary 5′ HA for knock-in cassette insertion at GAPDH locus
SEQ ID NO: 2
GAAGACTGTGGATGGCCCCTCCGGGAAACTGTGGCGTGATGGCCGCGGGGCTCTCCAGAACATC
ATCCCTGCCTCTACTGGCGCTGCCAAGGCTGTGGGCAAGGTCATCCCTGAGCTGAACGGGAAGC
TCACTGGCATGGCCTTCCGTGTCCCCACTGCCAACGTGTCAGTGGTGGACCTGACCTGCCGTCT
AGAAAAACCTGCCAAATATGATGACATCAAGAAGGTGGTGAAGCAGGCGTCGGAGGGCCCCCTC
AAGGGCATCCTGGGCTACACTGAGCACCAGGTGGTCTCCTCTGACTTCAACAGCGACACCCACT
CCTCCACCTTTGACGCTGGGGCTGGCATTGCCCTCAACGACCACTTTGTCAAGCTCATTTCCTG
GTATGTGGCTGGGGCCAGAGACTGGCTCTTAAAAAGTGCAGGGTCTGGCGCCCTCTGGTGGCTG
GCTCAGAAAAAGGGCCCTGACAACTCTTTACATCTTCTAGGTATGACAACGAGTTCGGATATAG
CAATAGAGTGGTCGATCTGATGGCTCATATGGCTAGCAAAGAGGGAAGCGGAGCTACTAACTTC
AGCCTGCTGAAGCAGGCTGGAGACGTGGAGGAGAACCCTGGACCT
exemplary 5′ HA for knock-in cassette insertion at GAPDH locus
SEQ ID NO: 3
GGCTTTCCCATAATTTCCTTTCAAGGTGGGGAGGGAGGTAGAGGGGTGATGTGGGGAGTACGCT
GCAGGGCCTCACTCCTTTTGCAGACCACAGTCCATGCCATCACTGCCACCCAGAAGACTGTGGA
TGGCCCCTCCGGGAAACTGTGGCGTGATGGCCGCGGGGCTCTCCAGAACATCATCCCTGCCTCT
ACTGGCGCTGCCAAGGCTGTGGGCAAGGTCATCCCTGAGCTGAACGGGAAGCTCACTGGCATGG
CCTTCCGTGTCCCCACTGCCAACGTGTCAGTGGTGGACCTGACCTGCCGTCTAGAAAAACCTGC
CAAATATGATGACATCAAGAAGGTGGTGAAGCAGGCGTCGGAGGGCCCCCTCAAGGGCATCCTG
GGCTACACTGAGCACCAGGTGGTCTCCTCTGACTTCAACAGCGACACCCACTCCTCCACCTTTG
ACGCTGGGGCTGGCATTGCCCTCAACGACCACTTTGTCAAGCTCATCTCTTGGTACGACAATGA
GTTCGGATATAGCAATAGAGTGGTCGATCTGATGGCTCATATGGCTAGCAAAGAG
exemplary 3′ HA for knock-in cassette insertion at GAPDH locus
SEQ ID NO: 4
ATTTGGCTACAGCAACAGGGTGGTGGACCTCATGGCCCACATGGCCTCCAAGGAGTAAGACCCC
TGGACCACCAGCCCCAGCAAGAGCACAAGAGGAAGAGAGAGACCCTCACTGCTGGGGAGTCCCT
GCCACACTCAGTCCCCCACCACACTGAATCTCCCCTCCTCACAGTTGCCATGTAGACCCCTTGA
AGAGGGGAGGGGCCTAGGGAGCCGCACCTTGTCATGTACCATCAATAAAGTACCCTGTGCTCAA
CCAGTTACTTGTCCTGTCTTATTCTAGGGTCTGGGGCAGAGGGGAGGGAAGCTGGGCTTGTGTC
AAGGTGAGACATTCTTGCTGGGGAGGGACCTGGTATGTTCTCCTCAGACTGAGGGTAGGGCCTC
CAAACAGCCTTGCTTGCTTCGAGAACCATTTGCTTCCCGCTCAGACGTCTTGAGTGCTACAGGA
AGCTGGCACCACTACTTCAGAGAACAAGGCCTTTTCCTCTCCTCGCTCCAGT
exemplary 3′ HA for knock-in cassette insertion at GAPDH locus
SEQ ID NO: 5
AGACTGGCTCTTAAAAAGTGCAGGGTCTGGCGCCCTCTGGTGGCTGGCTCAGAAAAAGGGCCCT
GACAACTCTTTTCATCTTCTAGGTATGACAACGAATTTGGCTACAGCAACAGGGTGGTGGACCT
CATGGCCCACATGGCCTCCAAGGAGTAAGACCCCTGGACCACCAGCCCCAGCAAGAGCACAAGA
GGAAGAGAGAGACCCTCACTGCTGGGGAGTCCCTGCCACACTCAGTCCCCCACCACACTGAATC
TCCCCTCCTCACAGTTGCCATGTAGACCCCTTGAAGAGGGGAGGGGCCTAGGGAGCCGCACCTT
GTCATGTACCATCAATAAAGTACCCTGTGCTCAACCAGTTACTTGTCCTGTCTTATTCTAGGGT
CTGGGGCAGAGGGGAGGGAAGCTGGGCTTGTGTCAAGGTGAGACATTCTTGCTGGGGAGGGACC
TGGTATGTTCTCCTCAGACTGAGGGTAGGGCCTCCAAACAGCCTTGCTTGCT

[0195] In some embodiments, a donor template comprises a 5′ and/or 3′ homology arm homologous to a region of a TBP locus. In some embodiments, a donor template comprises a 5′ homology arm comprising or consisting of the sequence of SEQ ID NO:6, 7, or 8. In some embodiments, a 5′ homology arm comprises or consists of a sequence that is at least 85%, 90%, 95%, 98% or 99% identical to the sequence of SEQ ID NO: 6, 7, or 8. In some embodiments, a donor template comprises a 3′ homology arm comprising or consisting of the sequence of SEQ ID NO:9, 10, or 11. In certain embodiments, a 3′ homology arm comprises or consists of a sequence that is at least 85%, 90%, 95%, 98% or 99% identical to the sequence of SEQ ID NO: 9, 10, or 11.

[0196] In some embodiments, a donor template comprises a 5′ homology arm comprising SEQ ID NO: 6, and a 3′ homology arm comprising SEQ ID NO: 9. In some embodiments, a donor template comprises a 5′ homology arm comprising SEQ ID NO: 7, and a 3′ homology arm comprising SEQ ID NO: 10. In some embodiments, a donor template comprises a 5′ homology arm comprising SEQ ID NO: 8, and a 3′ homology arm comprising SEQ ID NO: 11.

exemplary 5′ HA for knock-in cassette insertion at TBP locus
SEQ ID NO: 6
GCAGACTTCCATTTACAGTGAGGAGGTGAGCATTGCATTGAACAAAAGATGGCGTTTTCACTTG
GAATTAGTTATCTGAAGCTTTAGGATTCCTCAGCAATATGATTATGAGACAAGAAAGGAAGATT
CAGAAATGAGTCTAGTTGAAGGCAGCAATTCAGAGAAGAAGATTCAGTTGTTATCATTGCCGTC
CTGCTTGGTTTATGGCCTGGTTCAGGACCAAGGAGAGAAGTGTGAATACATGCCTCTTGAGCTA
TAGAATGAGACGCTGGAGTCACTAAGATGATTTTTTAAAAGTATTGTTTTATAAACAAAAATAA
GATTGTGACAAGGGATTCCACTATTAATGTTTTCATGCCTGTGCCTTAATCTGACTGGGTATGG
TGAGAATTGTGCTTGCAGCTTTAAGGTAAGAATTTTACCATCTTAATATGTTAAGAAGTGCCAT
TTCAGTCTCTCATCTCTACTCCAACTTGTCTTCTTAGGTGCTAAAGTCAGAGCCGAAATCTACG
AGGCCTTCGAGAACATCTACCCCATCCTGAAGGGCTTCAGAAAGACCACC
exemplary 5′ HA for knock-in cassette insertion at TBP locus
SEQ ID NO: 7
CTGACCACAGCTCTGCAAGCAGACTTCCATTTACAGTGAGGAGGTGAGCATTGCATTGAACAAA
AGATGGCGTTTTCACTTGGAATTAGTTATCTGAAGCTTTAGGATTCCTCAGCAATATGATTATG
AGACAAGAAAGGAAGATTCAGAAATGAGTCTAGTTGAAGGCAGCAATTCAGAGAAGAAGATTCA
GTTGTTATCATTGCCGTCCTGCTTGGTTTATGGCCTGGTTCAGGACCAAGGAGAGAAGTGTGAA
TACATGCCTCTTGAGCTATAGAATGAGACGCTGGAGTCACTAAGATGATTTTTTAAAAGTATTG
TTTTATAAACAAAAATAAGATTGTGACAAGGGATTCCACTATTAATGTTTTCATGCCTGTGCCT
TAATCTGACTGGGTATGGTGAGAATTGTGCTTGCAGCTTTAAGGTAAGAATTTTACCATCTTAA
TATGTTAAGAAGTGCCATTTCAGTCTCTCATCTCTACTCCAACTTGTCTTCTTAGGGGCTAAAG
TGCGGGCCGAGATCTACGAGGCCTTCGAGAATATCTACCCCATCCTGAAGGGCTTCAGAAAGAC
CACC
exemplary 5′ HA for knock-in cassette insertion at TBP locus
SEQ ID NO: 8
ACAAAAGATGGCGTTTTCACTTGGAATTAGTTATCTGAAGCTTTAGGATTCCTCAGCAATATGA
TTATGAGACAAGAAAGGAAGATTCAGAAATGAGTCTAGTTGAAGGCAGCAATTCAGAGAAGAAG
ATTCAGTTGTTATCATTGCCGTCCTGCTTGGTTTATGGCCTGGTTCAGGACCAAGGAGAGAAGT
GTGAATACATGCCTCTTGAGCTATAGAATGAGACGCTGGAGTCACTAAGATGATTTTTTAAAAG
TATTGTTTTATAAACAAAAATAAGATTGTGACAAGGGATTCCACTATTAATGTTTTCATGCCTG
TGCCTTAATCTGACTGGGTATGGTGAGAATTGTGCTTGCAGCTTTAAGGTAAGAATTTTACCAT
CTTAATATGTTAAGAAGTGCCATTTCAGTCTCTCATCTCTACTCCAACTTGTCTTCTTAGGTGC
TAAAGTCAGAGCAGAAATTTATGAAGCATTCGAGAACATCTACCCTATTCTAAAGGGATTCAGG
AAGACGACG
exemplary 3′ HA for knock-in cassette insertion at TBP locus
SEQ ID NO: 9
CAGAAATTTATGAAGCATTTGAAAACATCTACCCTATTCTAAAGGGATTCAGGAAGACGACGTA
ATGGCTCTCATGTACCCTTGCCTCCCCCACCCCCTTCTTTTTTTTTTTTTAAACAAATCAGTTT
GTTTTGGTACCTTTAAATGGTGGTGTTGTGAGAAGATGGATGTTGAGTTGCAGGGTGTGGCACC
AGGTGATGCCCTTCTGTAAGTGCCCACCGCGGGATGCCGGGAAGGGGCATTATTTGTGCACTGA
GAACACCGCGCAGCGTGACTGTGAGTTGCTCATACCGTGCTGCTATCTGGGCAGCGCTGCCCAT
TTATTTATATGTAGATTTTAAACACTGCTGTTGACAAGTTGGTTTGAGGGAGAAAACTTTAAGT
GTTAAAGCCACCTCTATAATTGATTGGACTTTTTAATTTTAATGTTTTTCCCCATGAACCACAG
TTTTTATATTTCTACCAGAAAAGTAAAAATCTTTTTTAAAAGTGTTGTTTTT
exemplary 3′ HA for knock-in cassette insertion at TBP locus
SEQ ID NO: 10
TAGGTGCTAAAGTCAGAGCAGAAATTTATGAAGCATTTGAAAACATCTACCCTATTCTAAAGGG
ATTCAGGAAGACGACGTAATGGCTCTCATGTACCCTTGCCTCCCCCACCCCCTTCTTTTTTTTT
TTTTAAACAAATCAGTTTGTTTTGGTACCTTTAAATGGTGGTGTTGTGAGAAGATGGATGTTGA
GTTGCAGGGTGTGGCACCAGGTGATGCCCTTCTGTAAGTGCCCACCGCGGGATGCCGGGAAGGG
GCATTATTTGTGCACTGAGAACACCGCGCAGCGTGACTGTGAGTTGCTCATACCGTGCTGCTAT
CTGGGCAGCGCTGCCCATTTATTTATATGTAGATTTTAAACACTGCTGTTGACAAGTTGGTTTG
AGGGAGAAAACTTTAAGTGTTAAAGCCACCTCTATAATTGATTGGACTTTTTAATTTTAATGTT
TTTCCCCATGAACCACAGTTTTTATATTTCTACCAGAAAAGTAAAAATCTTT
exemplary 3′ HA for knock-in cassette insertion at TBP locus
SEQ ID NO: 11
AAGGGATTCAGGAAGACGACGTAATGGCTCTCATGTACCCTTGCCTCCCCCACCCCCTTCTTTT
TTTTTTTTTAAACAAATCAGTTTGTTTTGGTACCTTTAAATGGTGGTGTTGTGAGAAGATGGAT
GTTGAGTTGCAGGGTGTGGCACCAGGTGATGCCCTTCTGTAAGTGCCCACCGCGGGATGCCGGG
AAGGGGCATTATTTGTGCACTGAGAACACCGCGCAGCGTGACTGTGAGTTGCTCATACCGTGCT
GCTATCTGGGCAGCGCTGCCCATTTATTTATATGTAGATTTTAAACACTGCTGTTGACAAGTTG
GTTTGAGGGAGAAAACTTTAAGTGTTAAAGCCACCTCTATAATTGATTGGACTTTTTAATTTTA
ATGTTTTTCCCCATGAACCACAGTTTTTATATTTCTACCAGAAAAGTAAAAATCTTTTTTAAAA
GTGTTGTTTTTCTAATTTATAACTCCTAGGGGTTATTTCTGTGCCAGACACA

[0197] In some embodiments, a donor template comprises a 5′ and/or 3′ homology arm homologous to a region of a G6PD locus. In some embodiments, a donor template comprises a 5′ homology arm comprising or consisting of the sequence of SEQ ID NO:12. In some embodiments, a 5′ homology arm comprises or consists of a sequence that is at least 85%, 90%, 95%, 98% or 99% identical to the sequence of SEQ ID NO: 12. In some embodiments, a donor template comprises a 3′ homology arm comprising or consisting of the sequence of SEQ ID NO:13. In certain embodiments, a 3′ homology arm comprises or consists of a sequence that is at least 85%, 90%, 95%, 98% or 99% identical to the sequence of SEQ ID NO:13.

[0198] In some embodiments, a donor template comprises a 5′ homology arm comprising SEQ ID NO: 12, and a 3′ homology arm comprising SEQ ID NO: 13.

exemplary 5′ HA for knock-in cassette insertion at G6PD locus
SEQ ID NO: 12
GGCCCGGGGGACTCCACATGGTGGCAGGCAGTGGCATCAGCAAGACACTCTCTCCCTCACAGAA
CGTGAAGCTCCCTGACGCCTATGAGCGCCTCATCCTGGACGTCTTCTGCGGGAGCCAGATGCAC
TTCGTGCGCAGGTGAGGCCCAGCTGCCGGCCCCTGCATACCTGTGGGCTATGGGGTGGCCTTTG
CCCTCCCTCCCTGTGTGCCACCGGCCTCCCAAGCCATACCATGTCCCCTCAGCGACGAGCTCCG
TGAGGCCTGGCGTATTTTCACCCCACTGCTGCACCAGATTGAGCTGGAGAAGCCCAAGCCCATC
CCCTATATTTATGGCAGGTGAGGAAAGGGTGGGGGCTGGGGACAGAGCCCAGCGGGCAGGGGCG
GGGTGAGGGTGGAGCTACCTCATGCCTCTCCTCCACCCGTCACTCTCCAGCCGAGGCCCCACGG
AGGCAGACGAGCTGATGAAGAGAGTGGGCTTCCAGTACGAGGGAACCTACAAATGGGTCAACCC
TCACAAGCTG
exemplary 3′ HA for knock-in cassette insertion at G6PD locus
SEQ ID NO: 13
GTGGGTGAACCCCCACAAGCTCTGAGCCCTGGGCACCCACCTCCACCCCCGCCACGGCCACCCT
CCTTCCCGCCGCCCGACCCCGAGTCGGGAGGACTCCGGGACCATTGACCTCAGCTGCACATTCC
TGGCCCCGGGCTCTGGCCACCCTGGCCCGCCCCTCGCTGCTGCTACTACCCGAGCCCAGCTACA
TTCCTCAGCTGCCAAGCACTCGAGACCATCCTGGCCCCTCCAGACCCTGCCTGAGCCCAGGAGC
TGAGTCACCTCCTCCACTCACTCCAGCCCAACAGAAGGAAGGAGGAGGGCGCCCATTCGTCTGT
CCCAGAGCTTATTGGCCACTGGGTCTCACTCCTGAGTGGGGCCAGGGTGGGAGGGAGGGACGAG
GGGGAGGAAAGGGGCGAGCACCCACGTGAGAGAATCTGCCTGTGGCCTTGCCCGCCAGCCTCAG
TGCCACTTGACATTCCTTGTCACCAGCAACATCTCGAGCCCCCTGGATGTCC

[0199] In some embodiments, a donor template comprises a 5′ and/or 3′ homology arm homologous to a region of a E2F4 locus. In some embodiments, a donor template comprises a 5′ homology arm comprising or consisting of the sequence of SEQ ID NO: 14, 15, or 16. In some embodiments, a 5′ homology arm comprises or consists of a sequence that is at least 85%, 90%, 95%, 98% or 99% identical to the sequence of SEQ ID NO: 14, 15, or 16. In some embodiments, a donor template comprises a 3′ homology arm comprising or consisting of the sequence of SEQ ID NO: 17, 18, or 19. In certain embodiments, a 3′ homology arm comprises or consists of a sequence that is at least 85%, 90%, 95%, 98% or 99% identical to the sequence of SEQ ID NO: 17, 18, or 19.

[0200] In some embodiments, a donor template comprises a 5′ homology arm comprising SEQ ID NO: 14, and a 3′ homology arm comprising SEQ ID NO: 17. In some embodiments, a donor template comprises a 5′ homology arm comprising SEQ ID NO: 15, and a 3′ homology arm comprising SEQ ID NO: 18. In some embodiments, a donor template comprises a 5′ homology arm comprising SEQ ID NO: 16, and a 3′ homology arm comprising SEQ ID NO: 19.

exemplary 5′ HA for knock-in cassette insertion at E2F4 locus
SEQ ID NO: 14
CCAGGGGGCTGTAGTGGGGCCAGGCTGGACCTCTGTGCCCTGAGCATGGCTTTCTTGTTTTTCA
GTTTTGGAACTCCCCAAAGAGCTGTCAGAAATCTTTGATCCCACACGAGGTAGGCTGCTGCATT
CCTCCCTGAGGCTAGGGGTAAGGGACACAGCTCATTGGGTCCTATGGCTGTTTTCTTGCCCTTT
TGAGGACCTTGTTGTGGCGCTTATGGTAACTGGGGCAAAGGGTGAAGTTCCTGATGGGCAGGTG
GGGTTCCCTTTCCTGGGCTTTGGTGGGTGGAGAGGTGGGAGCTGGAATGTTAGTAACTGAGCTC
CCTCCATTCCCAGAGTGCATGAGCTCGGAGCTGCTGGAGGAGTTGATGTCCTCAGAAGGTGGGT
GGCCCTGGAAGGTGGGAGTGGGTGTGGGCAGGGGTTGGGCTGCTGCTAGGGGAGCCCTGGCCCA
GGGCCTGAGACTAGTGCTCTCTGCAGTGTTCGCCCCTCTGCTGAGACTTTCTCCTCCTCCTGGC
GACCACGACTACATCTACAACCTGGACGAGAGCGAGGGCGTGTGCGACCTGTTTGATGTGCCCG
TGCTGAACCTG
exemplary 5′ HA for knock-in cassette insertion at E2F4 locus
SEQ ID NO: 15
CCAGGCTGGACCTCTGTGCCCTGAGCATGGCTTTCTTGTTTTTCAGTTTTGGAACTCCCCAAAG
AGCTGTCAGAAATCTTTGATCCCACACGAGGTAGGCTGCTGCATTCCTCCCTGAGGCTAGGGGT
AAGGGACACAGCTCATTGGGTCCTATGGCTGTTTTCTTGCCCTTTTGAGGACCTTGTTGTGGCG
CTTATGGTAACTGGGGCAAAGGGTGAAGTTCCTGATGGGCAGGTGGGGTTCCCTTTCCTGGGCT
TTGGTGGGTGGAGAGGTGGGAGCTGGAATGTTAGTAACTGAGCTCCCTCCATTCCCAGAGTGCA
TGAGCTCGGAGCTGCTGGAGGAGTTGATGTCCTCAGAAGGTGGGTGGCCCTGGAAGGTGGGAGT
GGGTGTGGGCAGGGGTTGGGCTGCTGCTAGGGGAGCCCTGGCCCAGGGCCTGAGACTAGTGCTC
TCTGCAGTGTTTGCCCCTCTGCTTCGTCTTAGTCCTCCTCCGGGCGACCACGACTACATCTACA
ACCTGGACGAGAGCGAGGGCGTGTGCGACCTGTTTGATGTGCCCGTGCTGAACCTG
exemplary 5′ HA for knock-in cassette insertion at E2F4 locus
SEQ ID NO: 16
GTCAGAAATCTTTGATCCCACACGAGGTAGGCTGCTGCATTCCTCCCTGAGGCTAGGGGTAAGG
GACACAGCTCATTGGGTCCTATGGCTGTTTTCTTGCCCTTTTGAGGACCTTGTTGTGGCGCTTA
TGGTAACTGGGGCAAAGGGTGAAGTTCCTGATGGGCAGGTGGGGTTCCCTTTCCTGGGCTTTGG
TGGGTGGAGAGGTGGGAGCTGGAATGTTAGTAACTGAGCTCCCTCCATTCCCAGAGTGCATGAG
CTCGGAGCTGCTGGAGGAGTTGATGTCCTCAGAAGGTGGGTGGCCCTGGAAGGTGGGAGTGGGT
GTGGGCAGGGGTTGGGCTGCTGCTAGGGGAGCCCTGGCCCAGGGCCTGAGACTAGTGCTCTCTG
CAGTGTTTGCCCCTCTGCTTCGTCTTTCTCCACCCCCGGGAGACCACGATTATATCTACAACCT
GGACGAGAGTGAAGGTGTCTGTGACCTCTTCGACGTGCCCGTGCTCAACCTC
exemplary 3′ HA for knock-in cassette insertion at E2F4 locus
SEQ ID NO: 17
CCACCCCCGGGAGACCACGATTATATCTACAACCTGGACGAGAGTGAAGGTGTCTGTGACCTCT
TTGATGTGCCTGTTCTCAACCTCTGACTGACAGGGACATGCCCTGTGTGGCTGGGACCCAGACT
GTCTGACCTGGGGGTTGCCTGGGGACCTCTCCCACCCGACCCCTACAGAGCTTGAGAGCCACAG
ACGCCTGGCTTCTCCGGCCTCCCCTCACCGCACAGTTCTGGCCACAGCTCCCGCTCCTGTGCTG
GCACTTCTGTGCTCGCAGAGCAGGGGAACAGGACTCAGCCCCCATCACCGTGGAGCCAAAGTGT
TTGCTTCTCCCTTTCTGCGGCCTTCGCCAGCCCAGGCTCGGCTGCCACCCAGTGGCACAGAACC
GAGGAGCTGCCATTACCCCCCATAGGGGGCAGTGTCTTGTTCCTGCCAGCCTCAGTGTCTTGCT
TCTGCCAGCTCCTTCCCCTAGGAGGGAAGGGTGGGGTGGAACTGGGCACATG
exemplary 3′ HA for knock-in cassette insertion at E2F4 locus
SEQ ID NO: 18
ATTATATCTACAACCTGGACGAGAGTGAAGGTGTCTGTGACCTCTTTGATGTGCCTGTTCTCAA
CCTCTGACTGACAGGGACATGCCCTGTGTGGCTGGGACCCAGACTGTCTGACCTGGGGGTTGCC
TGGGGACCTCTCCCACCCGACCCCTACAGAGCTTGAGAGCCACAGACGCCTGGCTTCTCCGGCC
TCCCCTCACCGCACAGTTCTGGCCACAGCTCCCGCTCCTGTGCTGGCACTTCTGTGCTCGCAGA
GCAGGGGAACAGGACTCAGCCCCCATCACCGTGGAGCCAAAGTGTTTGCTTCTCCCTTTCTGCG
GCCTTCGCCAGCCCAGGCTCGGCTGCCACCCAGTGGCACAGAACCGAGGAGCTGCCATTACCCC
CCATAGGGGGCAGTGTCTTGTTCCTGCCAGCCTCAGTGTCTTGCTTCTGCCAGCTCCTTCCCCT
AGGAGGGAAGGGTGGGGTGGAACTGGGCACATGCCAGCACCACTTCTAGCTT
exemplary 3′ HA for knock-in cassette insertion at E2F4 locus
SEQ ID NO: 19
TGACTGACAGGGACATGCCCTGTGTGGCTGGGACCCAGACTGTCTGACCTGGGGGTTGCCTGGG
GACCTCTCCCACCCGACCCCTACAGAGCTTGAGAGCCACAGACGCCTGGCTTCTCCGGCCTCCC
CTCACCGCACAGTTCTGGCCACAGCTCCCGCTCCTGTGCTGGCACTTCTGTGCTCGCAGAGCAG
GGGAACAGGACTCAGCCCCCATCACCGTGGAGCCAAAGTGTTTGCTTCTCCCTTTCTGCGGCCT
TCGCCAGCCCAGGCTCGGCTGCCACCCAGTGGCACAGAACCGAGGAGCTGCCATTACCCCCCAT
AGGGGGCAGTGTCTTGTTCCTGCCAGCCTCAGTGTCTTGCTTCTGCCAGCTCCTTCCCCTAGGA
GGGAAGGGTGGGGTGGAACTGGGCACATGCCAGCACCACTTCTAGCTTCCTTCGCTATCCCCCA
CCCCCTGACCCTCCAGCTCCTCCTGGCCCTCTCACGTGCCCACTTCTGCTGG

[0201] In some embodiments, a donor template comprises a 5′ and/or 3′ homology arm homologous to a region of a KIF11 locus. In some embodiments, a donor template comprises a 5′ homology arm comprising or consisting of the sequence of SEQ ID NO: 20, 21, or 22. In some embodiments, a 5′ homology arm comprises or consists of a sequence that is at least 85%, 90%, 95%, 98% or 99% identical to the sequence of SEQ ID NO: 20, 21, or 22. In some embodiments, a donor template comprises a 3′ homology arm comprising or consisting of the sequence of SEQ ID NO: 23, 24, or 25. In certain embodiments, a 3′ homology arm comprises or consists of a sequence that is at least 85%, 90%, 95%, 98% or 99% identical to the sequence of SEQ ID NO: 23, 24, or 25.

[0202] In some embodiments, a donor template comprises a 5′ homology arm comprising SEQ ID NO: 20, and a 3′ homology arm comprising SEQ ID NO: 23. In some embodiments, a donor template comprises a 5′ homology arm comprising SEQ ID NO: 21, and a 3′ homology arm comprising SEQ ID NO: 24. In some embodiments, a donor template comprises a 5′ homology arm comprising SEQ ID NO: 22, and a 3′ homology arm comprising SEQ ID NO: 25.

exemplary 5′ HA for knock-in cassette insertion at KIF11 locus
SEQ ID NO: 20
AGAGCAGGGTTTCTTGACAGCAGTGCTATTGGCATTTTAAACTGGATAATTCTTTGTTGTGATG
GGCTTTCCTGTGGACTGTACTATGTTGGTACACAAGAAAAACAGTGTACTATGTGAATACTCAC
TCAAAGCCAGTAGCACTCCCTGATTGTAACACCAAAAAAGTCTCTCAGCATTGCCAAATGTCCC
CTGTGGCAGCAGAATCACTCCCTGATGAGAACCACTACCCTGGAGTAAAATCTATAACTATGTC
TTAGAAAATAACACAGAAAATTAATATTTCTTTCACTCTACTCCTTCCATTAGTGATCAAATAA
AGAAGGCATTTGGCGCTACTTGCCAAATTGTTGGCTCAAACTTGTGCTGAACCTTTTTTGGTTT
TCTACACTTAAGTTTTTTTGCCTATAACCCAGAGAACTTTGAAAATAGAGTGTAGTTAATGTGT
ATCTAATGTTACTTTGTATTGACTTAATTTACCGGCCTTTAATCCACAGCATAAGAAGTCCCAC
GGCAAGGACAAAGAGAACCGGGGCATCAACACACTGGAACGGTCCAAGGTCGAGGAAACAACCG
AGCACCTGGTCACCAAGAGCAGACTGCCTCTGAGAGCCCAGATCAACCTG
exemplary 5′ HA for knock-in cassette insertion at KIF11 locus
SEQ ID NO: 21
TTCCTGTGGACTGTACTATGTTGGTACACAAGAAAAACAGTGTACTATGTGAATACTCACTCAA
AGCCAGTAGCACTCCCTGATTGTAACACCAAAAAAGTCTCTCAGCATTGCCAAATGTCCCCTGT
GGCAGCAGAATCACTCCCTGATGAGAACCACTACCCTGGAGTAAAATCTATAACTATGTCTTAG
AAAATAACACAGAAAATTAATATTTCTTTCACTCTACTCCTTCCATTAGTGATCAAATAAAGAA
GGCATTTGGCGCTACTTGCCAAATTGTTGGCTCAAACTTGTGCTGAACCTTTTTTGGTTTTCTA
CACTTAAGTTTTTTTGCCTATAACCCAGAGAACTTTGAAAATAGAGTGTAGTTAATGTGTATCT
AATGTTACTTTGTATTGACTTAATTTTCCCGCCTTAAATCCACAGCATAAAAAATCACATGGAA
AAGACAAAGAAAACAGAGGCATTAACACACTGGAGAGGTCTAAAGTGGAAGAAACAACCGAGCA
CCTGGTCACCAAGAGCAGACTGCCTCTGAGAGCCCAGATCAACCTG
exemplary 5′ HA for knock-in cassette insertion at KIF11 locus
SEQ ID NO: 22
TTAAACTGGATAATTCTTTGTTGTGATGGGCTTTCCTGTGGACTGTACTATGTTGGTACACAAG
AAAAACAGTGTACTATGTGAATACTCACTCAAAGCCAGTAGCACTCCCTGATTGTAACACCAAA
AAAGTCTCTCAGCATTGCCAAATGTCCCCTGTGGCAGCAGAATCACTCCCTGATGAGAACCACT
ACCCTGGAGTAAAATCTATAACTATGTCTTAGAAAATAACACAGAAAATTAATATTTCTTTCAC
TCTACTCCTTCCATTAGTGATCAAATAAAGAAGGCATTTGGCGCTACTTGCCAAATTGTTGGCT
CAAACTTGTGCTGAACCTTTTTTGGTTTTCTACACTTAAGTTTTTTTGCCTATAACCCAGAGAA
CTTTGAAAATAGAGTGTAGTTAATGTGTATCTAATGTTACTTTGTATTGACTTAATTTTCCCGC
CTTAAATCCACAGCATAAAAAATCACATGGAAAAGACAAAGAAAACAGAGGCATCAACACACTG
GAACGGTCCAAGGTCGAGGAAACAACCGAGCACCTGGTCACCAAGAGCAGACTGCCTCTGAGAG
CCCAGATCAACCTG
exemplary 3′ HA for knock-in cassette insertion at KIF11 locus
SEQ ID NO: 23
AAAAAATCACATGGAAAAGACAAAGAAAACAGAGGCATTAACACACTGGAGAGGTCTAAAGTGG
AAGAAACTACAGAGCACTTGGTTACAAAGAGCAGATTACCTCTGCGAGCCCAGATCAACCTTTA
ATTCACTTGGGGGTTGGCAATTTTATTTTTAAAGAAAACTTAAAAATAAAACCTGAAACCCCAG
AACTTGAGCCTTGTGTATAGATTTTAAAAGAATATATATATCAGCCGGGCGCGGTGGCTCATGC
CTGTAATCCCAGCACTTTGGGAGGCTGAGGCGGGTGGATTGCTTGAGCCCAGGAGTTTGAGACC
AGCCTGGCCAACGTGGCAAAACCTCGTCTCTGTTAAAAATTAGCCGGGCGTGGTGGCACACTCC
TGTAATCCCAGCTACTGGGGAGGCTGAGGCACGAGAATCACTTGAACCCAGGAAGCGGGGTTGC
AGTGAGCCAAAGGTACACCACTACACTCCAGCCTGGGCAACAGAGCAAGACT
exemplary 3′ HA for knock-in cassette insertion at KIF11 locus
SEQ ID NO: 24
AACTACAGAGCACTTGGCTACATAGAGCAGATTACCTCTGCGAGCCCAGATCAACCTTTAATTC
ACTTGGGGGTTGGCAATTTTATTTTTAAAGAAAACTTAAAAATAAAACCTGAAACCCCAGAACT
TGAGCCTTGTGTATAGATTTTAAAAGAATATATATATCAGCCGGGCGCGGTGGCTCATGCCTGT
AATCCCAGCACTTTGGGAGGCTGAGGCGGGTGGATTGCTTGAGCCCAGGAGTTTGAGACCAGCC
TGGCCAACGTGGCAAAACCTCGTCTCTGTTAAAAATTAGCCGGGCGTGGTGGCACACTCCTGTA
ATCCCAGCTACTGGGGAGGCTGAGGCACGAGAATCACTTGAACCCAGGAAGCGGGGTTGCAGTG
AGCCAAAGGTACACCACTACACTCCAGCCTGGGCAACAGAGCAAGACTCGGTCTCAAAAACAAA
ATTTAAAAAAGATATAAGGCAGTACTGTAAATTCAGTTGAATTTTGATATCT
exemplary 3′ HA for knock-in cassette insertion at KIF11 locus
SEQ ID NO: 25
ATTAACACACTGGAGAGTTCTGAAGTGGAAGAAACTACAGAGCACTTGGTTACAAAGAGCAGAT
TACCTCTGCGAGCCCAGATCAACCTTTAATTCACTTGGGGGTTGGCAATTTTATTTTTAAAGAA
AACTTAAAAATAAAACCTGAAACCCCAGAACTTGAGCCTTGTGTATAGATTTTAAAAGAATATA
TATATCAGCCGGGCGCGGTGGCTCATGCCTGTAATCCCAGCACTTTGGGAGGCTGAGGCGGGTG
GATTGCTTGAGCCCAGGAGTTTGAGACCAGCCTGGCCAACGTGGCAAAACCTCGTCTCTGTTAA
AAATTAGCCGGGCGTGGTGGCACACTCCTGTAATCCCAGCTACTGGGGAGGCTGAGGCACGAGA
ATCACTTGAACCCAGGAAGCGGGGTTGCAGTGAGCCAAAGGTACACCACTACACTCCAGCCTGG
GCAACAGAGCAAGACTCGGTCTCAAAAACAAAATTTAAAAAAGATATAAGGC

### Inverted Terminal Repeats (ITRs)

[0203] In certain embodiments, a donor template comprises an AAV derived sequence. In certain embodiments, a donor template comprises AAV derived sequences that are typical of an AAV construct, such as cis-acting 5′ and 3′ inverted terminal repeats (ITRs) (See, e.g., B. J. Carter, in “Handbook of Parvoviruses”, ed., P. Tijsser, CRC Press, pp. 155 168 (1990), which is incorporated in its entirety herein by reference). Generally, ITRs are able to form a hairpin. The ability to form a hairpin can contribute to an ITRs ability to self-prime, allowing primase-independent synthesis of a second DNA strand. ITRs also play a role in integration of AAV construct (e.g., a coding sequence) into a genome of a target cell. ITRs can also aid in efficient encapsidation of an AAV construct in an AAV particle.

[0204] In some embodiments, a donor template described herein is included within an rAAV particle (e.g., an AAV6 particle). In some embodiments, an ITR is or comprises about 145 nucleic acids. In some embodiments, all or substantially all of a sequence encoding an ITR is used. In some embodiments, an AAV ITR sequence may be obtained from any known AAV, including presently identified mammalian AAV types. In some embodiments an ITR is an AAV6 ITR.

[0205] An example of an AAV construct employed in the present disclosure is a “cis-acting” construct containing a cargo sequence (e.g., a donor template described herein), in which the donor template is flanked by 5′ or “left” and 3′ or “right” AAV ITR sequences. 5′ and left designations refer to a position of an ITR sequence relative to an entire construct, read left to right, in a sense direction. For example, in some embodiments, a 5′ or left ITR is an ITR that is closest to a target loci promoter (as opposed to a polyadenylation sequence) for a given construct, when a construct is depicted in a sense orientation, linearly. Concurrently, 3′ and right designations refer to a position of an ITR sequence relative to an entire construct, read left to right, in a sense direction. For example, in some embodiments, a 3′ or right ITR is an ITR that is closest to a polyadenylation sequence in a target loci (as opposed to a promoter sequence) for a given construct, when a construct is depicted in a sense orientation, linearly. ITRs as provided herein are depicted in 5′ to 3′ order in accordance with a sense strand. Accordingly, one of skill in the art will appreciate that a 5′ or “left” orientation ITR can also be depicted as a 3′ or “right” ITR when converting from sense to antisense direction. Further, it is well within the ability of one of skill in the art to transform a given sense ITR sequence (e.g., a 5′/left AAV ITR) into an antisense sequence (e.g., 3/right ITR sequence). One of ordinary skill in the art would understand how to modify a given ITR sequence for use as either a 5′/left or 3/right ITR, or an antisense version thereof.

[0206] For example, in some embodiments an ITR (e.g., a 5′ ITR) can have a sequence according to SEQ ID NO: 158. In some embodiments, an ITR (e.g., a 3′ ITR) can have a sequence according to SEQ ID NO: 159. In some embodiments, an ITR includes one or more modifications, e.g., truncations, deletions, substitutions or insertions, as is known in the art. In some embodiments, an ITR comprises fewer than 145 nucleotides, e.g., 127, 130, 134 or 141 nucleotides. For example, in some embodiments, an ITR comprises 110, 111, 112, 113, 114, 115, 116, 117, 118, 119, 120, 121, 122, 123, 124, 125, 126, 127, 128, 129, 130, 131, 132, 133, 134, 135, 136, 137, 138, 139, 140, 141, 142, 143 144, or 145 nucleotides.

[0207] A non-limiting example of 5′ AAV ITR sequences includes SEQ ID NO: 158. A non-limiting example of 3′ AAV ITR sequences includes SEQ ID NO: 159. In some embodiments, the 5′ and a 3′ AAV ITRs (e.g., SEQ ID NO: 158 and 159) flank a donor template described herein (e.g., a donor template comprising a 5′HA, a knock-in cassette, and a 3′ HA). The ability to modify ITR sequences is within the skill of the art. (See, e.g., texts such as Sambrook et al. “Molecular Cloning. A Laboratory Manual”, 2d ed., Cold Spring Harbor Laboratory, New York (1989); and K. Fisher et al., J Virol., 70:520 532 (1996), each of which is incorporated in its entirety herein by reference). In some embodiments, a 5′ ITR sequence is at least 85%, 90%, 95%, 98% or 99% identical to a 5′ ITR sequence represented by SEQ ID NO: 158. In some embodiments, a 3′ ITR sequence is at least 85%, 90%, 95%, 98% or 99% identical to a 3′ ITR sequence represented by SEQ ID NO: 159.

exemplary 5′ ITR for knock-in cassette insertion
SEQ ID NO: 158
CCTGCAGGCAGCTGCGCGCTCGCTCGCTCACTGAGGCCGCCCGGG
CAAAGCCCGGGCGTCGGGCGACCTTTGGTCGCCCGGCCTCAGTGA
GCGAGCGAGCGCGCAGAGAGGGAGTGGCCAACTCCATCACTAGGG
GTTCCT
exemplary 3′ ITR for knock-in cassette insertion
SEQ ID NO: 159
AGGAACCCCTAGTGATGGAGTTGGCCACTCCCTCTCTGCGCGCTC
GCTCGCTCACTGAGGCCGGGCGACCAAAGGTCGCCCGACGCCCGG
GCTTTGCCCGGGCGGCCTCAGTGAGCGAGCGAGCGCGCAGCTGCC
TGCAGG

### Flanking Untranslated Regions, 5′ UTRs and 3′ UTRs

[0208] In some embodiments, a knock-in cassette described herein includes all or a portion of an untranslated region (UTR), such as a 5′ UTR and/or a 3′ UTR. UTRs of a gene are transcribed but not translated. A 5′ UTR starts at a transcription start site and continues to the start codon but does not include the start codon. A 3′ UTR starts immediately following the stop codon and continues until the transcriptional termination signal. The regulatory and/or control features of a UTR can be incorporated into any of the knock-in cassettes described herein to enhance or otherwise modulate the expression of an essential target gene loci and/or a cargo sequence.

[0209] Natural 5′ UTRs include a sequence that plays a role in translation initiation. In some embodiments, a 5′ UTR comprises sequences, like Kozak sequences, which are commonly known to be involved in the process by which the ribosome initiates translation of many genes. Kozak sequences have the consensus sequence CCR(A/G)CCAUGG, where R is a purine (A or G) three bases upstream of the start codon (AUG), and the start codon is followed by another “G”. The 5′ UTRs have also been known to form secondary structures that are involved in elongation factor binding. Non-limiting examples of 5′ UTRs include those from the following genes: albumin, serum amyloid A, Apolipoprotein A/B/E, transferrin, alpha fetoprotein, erythropoietin, and Factor VIII.

[0210] In some embodiments, a UTR may comprise a non-endogenous regulatory region. In some embodiments, a UTR that comprises a non-endogenous regulatory region is a 3′ UTR. In some embodiments, a UTR that comprises a non-endogenous regulatory region is a 5′ UTR. In some embodiments, a non-endogenous regulatory region may be a target of at least one inhibitory nucleic acid. In some embodiments, an inhibitory nucleic acid inhibits expression and/or activity of a target gene. In some embodiments, an inhibitory nucleic acid is a short interfering RNA (siRNA), a short hairpin RNA (shRNA), a microRNA (miRNA), an antisense oligonucleotide, a guide RNA (gRNA), or a ribozyme. In some embodiments, an inhibitory nucleic acid is an endogenous molecule. In some embodiments, an inhibitory nucleic acid is a non-endogenous molecule. In some embodiments, an inhibitory nucleic acid displays a tissue specific expression pattern. In some embodiments, an inhibitory nucleic acid displays a cell specific expression pattern.

[0211] In some embodiments, a knock-in cassette may comprise more than one non-endogenous regulatory regions, e.g., two, three, four, five, six, seven, eight, nine, or ten regulatory regions. In some embodiments, a knock-in cassette may comprise four non-endogenous regulatory regions. In some embodiments, a construct may comprise more than one non-endogenous regulatory regions, wherein at least one of the more than one non-endogenous regulatory regions are not the same as at least one of the other non-endogenous regulatory regions.

[0212] In some embodiments, a 3′ UTR is found immediately 3′ to the stop codon of a gene of interest. In some embodiments, a 3′ UTR from an mRNA that is transcribed by a target cell can be included in any knock-in cassette described herein. In some embodiments, a 3′ UTR is derived from an endogenous target loci and may include all or part of the endogenous sequence. In some embodiments, a 3′ UTR sequence is at least 85%, 90%, 95% or 98% identical to the sequence of SEQ ID NO: 26.

exemplary 3′ UTR for knock-in cassette insertion
SEQ ID NO: 26
GCGGCCGCGTCGAGTCTAGAGGGCCCGTTTAAACCCGCTGATCAG
CCTCGA

### Polyadenylation Sequences

[0213] In some embodiments, a knock-in cassette construct provided herein can include a polyadenylation (poly(A)) signal sequence. Most nascent eukaryotic mRNAs possess a poly(A) tail at their 3′ end, which is added during a complex process that includes cleavage of the primary transcript and a coupled polyadenylation reaction driven by the poly(A) signal sequence (see, e.g., Proudfoot et al., Cell 108:501-512, 2002, which is incorporated herein by reference in its entirety). A poly(A) tail confers mRNA stability and transferability (Molecular Biology of the Cell, Third Edition by B. Alberts et al., Garland Publishing, 1994, which is incorporated herein by reference in its entirety). In some embodiments, a poly(A) signal sequence is positioned 3′ to a coding sequence.

[0214] As used herein, “polyadenylation” refers to the covalent linkage of a polyadenylyl moiety, or its modified variant, to a messenger RNA molecule. In eukaryotic organisms, most messenger RNA (mRNA) molecules are polyadenylated at the 3′ end. A 3′ poly(A) tail is a long sequence of adenine nucleotides (e.g., 50, 60, 70, 100, 200, 500, 1000, 2000, 3000, 4000, or 5000) added to the pre-mRNA through the action of an enzyme, polyadenylate polymerase. In some embodiments, a poly(A) tail is added onto transcripts that contain a specific sequence, e.g., a polyadenylation (or poly(A)) signal. A poly(A) tail and associated proteins aid in protecting mRNA from degradation by exonucleases. Polyadenylation also plays a role in transcription termination, export of the mRNA from the nucleus, and translation. Polyadenylation typically occurs in the nucleus immediately after transcription of DNA into RNA, but also can occur later in the cytoplasm. After transcription has been terminated, an mRNA chain is cleaved through the action of an endonuclease complex associated with RNA polymerase. A cleavage site is usually characterized by the presence of the base sequence AAUAAA near the cleavage site. After the mRNA has been cleaved, adenosine residues are added to the free 3′ end at the cleavage site.

[0215] As used herein, a “poly(A) signal sequence” or “polyadenylation signal sequence” is a sequence that triggers the endonuclease cleavage of an mRNA and the addition of a series of adenosines to the 3′ end of the cleaved mRNA.

[0216] There are several poly(A) signal sequences that can be used, including those derived from bovine growth hormone (bGH) (Woychik et al., Proc. Natl. Acad Sci. US.A. 81(13):3944-3948, 1984; U.S. Pat. No. 5,122,458, each of which is incorporated herein by reference in its entirety), mouse-β-globin, mouse-α-globin (Orkin et al., EMBO J 4(2):453-456, 1985; Thein et al., Blood 71(2):313-319, 1988, each of which is incorporated herein by reference in its entirety), human collagen, polyoma virus (Batt et al., Mol. Cell Biol. 15(9):4783-4790, 1995, which is incorporated herein by reference in its entirety), the Herpes simplex virus thymidine kinase gene (HSV TK), IgG heavy-chain gene polyadenylation signal (US 2006/0040354, which is incorporated herein by reference in its entirety), human growth hormone (hGH) (Szymanski et al., Mol. Therapy 15(7):1340-1347, 2007, which is incorporated herein by reference in its entirety), the group comprising a SV40 poly(A) site, such as the SV40 late and early poly(A) site (Schek et al., Mol. Cell Biol. 12(12):5386-5393, 1992, which is incorporated herein by reference in its entirety).

[0217] The poly(A) signal sequence can be AATAAA. The AATAAA sequence may be substituted with other hexanucleotide sequences with homology to AATAAA and that are capable of signaling polyadenylation, including ATTAAA, AGTAAA, CATAAA, TATAAA, GATAAA, ACTAAA, AATATA, AAGAAA, AATAAT, AAAAAA, AATGAA, AATCAA, AACAAA, AATCAA, AATAAC, AATAGA, AATTAA, or AATAAG (see, e.g., WO 06/12414, which is incorporated herein by reference in its entirety).

[0218] In some embodiments, a poly(A) signal sequence can be a synthetic polyadenylation site (see, e.g., the pCl-neo expression construct of Promega that is based on Levitt el al., Genes Dev. 3(7):1019-1025, 1989, which is incorporated herein by reference in its entirety). In some embodiments, a poly(A) signal sequence is the polyadenylation signal of soluble neuropilin-1 (sNRP) (AAATAAAATACGAAATG) (see, e.g., WO 05/073384, which is incorporated herein by reference in its entirety). In some embodiments, a poly(A) signal sequence comprises or consists of the SV40 poly(A) site. In some embodiments, a poly(A) signal sequence comprises or consists of SEQ ID NO: 27. In some embodiments, a poly(A) signal sequence comprises or consists of bGHpA. In some embodiments, a poly(A) signal sequence comprises or consists of SEQ ID NO: 28. Additional examples of poly(A) signal sequences are known in the art. In some embodiments, a poly(A) sequence is at least 85%, 90%, 95%, 98% or 99% identical to the sequence of SEQ ID NOs: 27 or 28.

exemplary SV40 poly(A) signal sequence
SEQ ID NO: 27
AACTTGTTTATTGCAGCTTATAATGGTTACAAATAAAGCAATAGC
ATCACAAATTTCACAAATAAAGCATTTTTTTCACTGCATTCTAGT
TGTGGTTTGTCCAAACTCATCAATGTATCTTA
exemplary bGH poly(A) signal sequence
SEQ ID NO: 28
CTGTGCCTTCTAGTTGCCAGCCATCTGTTGTTTGCCCCTCCCCCG
TGCCTTCCTTGACCCTGGAAGGTGCCACTCCCACTGTCCTTTCCT
AATAAAATGAGGAAATTGCATCGCATTGTCTGAGTAGGTGTCATT
CTATTCTGGGGGGTGGGGTGGGGCAGGACAGCAAGGGGGAGGATT
GGGAAGACAATAGCAGGCATGCTGGGGATGCGGTGGGCTCTATGG

### IRES and 2A Elements

[0219] In some embodiments, the knock-in cassette comprises a regulatory element that enables expression of the gene product encoded by the essential gene and the gene product of interest as separate gene products, e.g., an IRES or 2A element located between the exogenous coding sequence or partial coding sequence of the essential gene and the exogenous coding sequence for the gene product of interest.

[0220] In some embodiments, a knock-in cassette may comprise multiple gene products of interest (e.g., at least two gene products of interest). In some embodiments, gene products of interest may be separated by a regulatory element that enables expression of the at least two gene products of interest as more than one gene product, e.g., an IRES or 2A element located between the at least two coding sequences, facilitating creation of at least two peptide products.

[0221] Internal Ribosome Entry Site (IRES) elements are one type of regulatory element that are commonly used for this purpose. As is well known in the art, IRES elements allow for initiation of translation from an internal region of the mRNA and hence expression of two separate proteins from the same mRNA transcript. IRES was originally discovered in poliovirus RNA, where it promotes translation of the viral genome in eukaryotic cells. Since then, a variety of IRES sequences have been discovered—many from viruses, but also some from cellular mRNAs, e.g., see Mokrejs et al., Nucleic Acids Res. 2006; 34(Database issue):D125-D130.

[0222] 2A elements are another type of regulatory element that are commonly used for this purpose. These 2A elements encode so-called “self-cleaving” 2A peptides which are short peptides (about 20 amino acids) that were first discovered in picornaviruses. The term “self-cleaving” is not entirely accurate, as these peptides are thought to function by making the ribosome skip the synthesis of a peptide bond at the C-terminus of a 2A element, leading to separation between the end of the 2A sequence and the next peptide downstream. The “cleavage” occurs between the Glycine (G) and Proline (P) residues found on the C-terminus meaning the upstream cistron, i.e., protein encoded by the essential gene will have a few additional residues from the 2A peptide added to the end, while the downstream cistron, i.e., gene product of interest will start with the Proline (P).

[0223] Table 2 below lists the four commonly used 2A peptides (an optional GSG sequence is sometimes added to the N-terminal end of the peptide to improve cleavage efficiency). There are many potential 2A peptides that may be suitable for methods and compositions described herein (see e.g., Luke et al., Occurrence, function and evolutionary origins of ‘2A-like’ sequences in virus genomes. J Gen Virol. 2008). Those skilled in the art know that the choice of specific 2A peptide for a particular knock-in cassette will ultimately depend on a number of factors such as cell type or experimental conditions. Those skilled in the art will recognize that nucleotide sequences encoding specific 2A peptides can vary while still encoding a peptide suitable for inducing a desired cleavage event.

TABLE 2
Exemplary 2A peptide sequences

| SEQ | | |
|---|---|---|
| ID | 2A | |
| NO: | peptide | Sequence |
| 29 | T2A | EGRGSLLTCGDVEENPGP |
| 30 | P2A | ATNFSLLKQAGDVEENPGP |
| 31 | E2A | QCTNYALLKLAGDVESNPGP |
| 32 | F2A | VKQTLNFDLLKLAGDVESNPGP |
| 33 | T2A | GAGGGCAGAGGAAGTCTTCTAACATGOGGT |
| | | GACGTGGAGGAGAATCCTGGCCCG |
| 34 | P2A | GGAAGCGGAGCTACTAACTTCAGCCTGCTG |
| | | AAGCAGGCTGGAGACGTGGAGGAGAACCCT |
| | | GGACCT |
| 35 | E2A | CAGTGTACTAATTATGCTCTCTTGAAATTG |
| | | GCTGGAGATGTTGAGAGCAACCCTGGACCT |
| 36 | F2A | GTGAAACAGACTTTGAATTTTGACCTTCTC |
| | | AAGTTGGCGGGAGACGTGGAGTCCAACCCT |
| | | GGACCT |
| 37 | IRES | CCCCTCTCCCTCCCCCCCCCCTAACGTTAC |
| | | TGGCCGAAGCCGCTTGGAATAAGGCCGGTG |
| | | TGCGTTTGTCTATATGTTATTTTCCACCAT |
| | | ATTGCCGTCTTTTGGCAATGTGAGGGCCCG |
| | | GAAACCTGGCCCTGTCTTCTTGACGAGCAT |
| | | TCCTAGGGGTCTTTCCCCTCTCGCCAAAGG |
| | | AATGCAAGGTCTGTTGAATGTCGTGAAGGA |
| | | AGCAGTTCCTCTGGAAGCTTCTTGAAGACA |
| | | AACAACGTCTGTAGCGACCCTTTGCAGGCA |
| | | GCGGAACCCCCCACCTGGCGACAGGTGCCT |
| | | CTGCGGCCAAAAGCCACGTGTATAAGATAC |
| | | ACCTGCAAAGGCGGCACAACCCCAGTGCCA |
| | | CGTTGTGAGTTGGATAGTTGTGGAAAGAGT |
| | | CAAATGGCTCTCCTCAAGCGTATTCAACAA |
| | | GGGGCTGAAGGATGCCCAGAAGGTACCCCA |
| | | TTGTATGGGATCTGATCTGGGGCCTCGGTG |
| | | CACATGCTTTACATGTGTTTAGTCGAGGTT |
| | | AAAAAAACGTCTAGGCCCCCCGAACCACGG |
| | | GGACGTGGTTTTCCTTTGAAAAACACGATG |
| | | ATAA |

### Essential Genes

[0224] An essential gene can be any gene that is essential for the survival, the proliferation, and/or the development of the cell.

[0225] In some embodiments, an essential gene is a housekeeping gene that is essential for survival of all cell types, e.g., a gene listed in Table 3. See also other housekeeping genes discussed in Eisenberg, Trends in Gen. 2014; 30(3):119-20 and Mocin et al., Adv. Biomed Res. 2017; 6:15. In some embodiments, an essential gene is a housekeeping gene that is essential for survival of a B cell. In some embodiments, an essential gene is a housekeeping gene that is essential for survival of an iPSC/ESC. Additional genes that are essential for various cell types, including iPSCs/ESCs, are listed in Table 4 (see also the essential genes discussed in Yilmaz et al., Nat. Cell Biol. 2018; 20:610-619 the entire contents of which are incorporated herein by reference).

[0226] In some embodiments, an essential gene is a gene that is essential for development of a B cell, e.g., a gene that is essential for differentiation of a B cell from an iPSC, ESC, or HSC to a B cell.

[0227] In some embodiments the essential gene is GAPDH and the DNA nuclease causes a break in exon 9, e.g., a double-strand break. In some embodiments the essential gene is TBP and the DNA nuclease causes a break in exon 7, or exon 8, e.g., a double-strand break. In some embodiments the essential gene is E2F4 and the DNA nuclease causes a break in exon 10, e.g., a double-strand break. In some embodiments the essential gene is G6PD and the DNA nuclease causes a break in exon 13, e.g., a double-strand break. In some embodiments the essential gene is KIF11 and the DNA nuclease causes a break in exon 22, e.g., a double-strand break.

TABLE 3
Exemplary housekeeping genes

| Ensembl | Gene | Ensembl | Gene |
|---|---|---|---|
| ID | Symbol | ID | Symbol |
| ENSG00000075624 | ACTB | ENSG00000231500 | RPS18 |
| ENSG00000116459 | ATP5F1 | ENSG00000112592 | TBP |
| ENSG00000166710 | B2M | ENSG00000072274 | TFRC |
| ENSG00000111640 | GAPDH | ENSG00000164924 | YWHAZ |
| ENSG00000169919 | GUSB | ENSG00000089157 | RPLP0 |
| ENSG00000165704 | HPRT1 | ENSG00000142541 | RPL13A |
| ENSG00000102144 | PGK1 | ENSG00000147604 | RPL7 |
| ENSG00000196262 | PPIA | ENSG00000205250 | E2F4 |
| ENSG00000138160 | KIF11 | ENSG00000160211 | G6PD |

TABLE 4
Additional exemplary essential genes

| Ensembl ID | Gene Symbol | Ensembl ID | Gene Symbol |
|---|---|---|---|
| ENSG00000111704 | NANOG | ENSG00000181449 | SOX2 |
| ENSG00000179059 | ZFP42 | ENSG00000136997 | MYC |
| ENSG00000136826 | KLF4 | ENSG00000175166 | PSMD2 |
| ENSG00000118655 | DCLRE1B | ENSG00000070614 | NDST1 |
| ENSG00000172409 | CLP1 | ENSG00000115484 | CCT4 |
| ENSG00000082898 | XPO1 | ENSG00000100890 | KIAA0391 |
| ENSG00000114867 | EIF4G1 | ENSG00000149474 | CSRP2BP |
| ENSG00000115866 | DARS | ENSG00000102738 | MRPS31 |
| ENSG00000204628 | GNB2L1 | ENSG00000136104 | RNASEH2B |
| ENSG00000198242 | RPL23A | ENSG00000106246 | PTCD1 |
| ENSG00000158526 | TSR2 | ENSG00000248919 | ATP5J2-PTCD1 |
| ENSG00000125450 | NUP85 | ENSG00000138663 | COPS4 |
| ENSG00000134371 | CDC73 | ENSG00000115368 | WDR75 |
| ENSG00000164941 | INTS8 | ENSG00000128564 | VGF |
| ENSG00000055483 | USP36 | ENSG00000128191 | DGCR8 |
| ENSG00000258366 | RTEL1 | ENSG00000008294 | SPAG9 |
| ENSG00000188846 | RPL14 | ENSG00000131475 | VPS25 |
| ENSG00000247626 | MARS2 | ENSG00000105523 | FAM83E |
| ENSG00000095787 | WAC | ENSG00000172269 | DPAGT1 |
| ENSG00000108094 | CUL2 | ENSG00000170312 | CDK1 |
| ENSG00000185946 | RNPC3 | ENSG00000104131 | EIF3J |
| ENSG00000154473 | BUB3 | ENSG00000150753 | CCT5 |
| ENSG00000204394 | VARS | ENSG00000140443 | IGF1R |
| ENSG00000103051 | COG4 | ENSG00000010292 | NCAPD2 |
| ENSG00000104738 | MCM4 | ENSG00000171763 | SPATA5L1 |
| ENSG00000117222 | RBBP5 | ENSG00000180098 | TRNAU1AP |
| ENSG00000082516 | GEMIN5 | ENSG00000168374 | ARF4 |
| ENSG00000100162 | CENPM | ENSG00000173812 | EIF1 |
| ENSG00000141456 | PELP1 | ENSG00000100554 | ATP6V1D |
| ENSG00000137807 | KIF23 | ENSG00000072756 | TRNT1 |
| ENSG00000112685 | EXOC2 | ENSG00000135372 | NAT10 |
| ENSG00000125995 | ROMO1 | ENSG00000178394 | HTR1A |
| ENSG00000136891 | TEX10 | ENSG00000128272 | ATF4 |
| ENSG00000173113 | TRMT112 | ENSG00000204070 | SYS1 |
| ENSG00000075914 | EXOSC7 | ENSG00000137815 | RTF1 |
| ENSG00000119523 | ALG2 | ENSG00000198026 | ZNF335 |
| ENSG00000244038 | DDOST | ENSG00000117410 | ATP6V0B |
| ENSG00000108175 | ZMIZ1 | ENSG00000112739 | PRPF4B |
| ENSG00000129691 | ASH2L | ENSG00000129347 | KRI1 |
| ENSG00000183207 | RUVBL2 | ENSG00000221818 | EBF2 |
| ENSG00000055044 | NOP58 | ENSG00000198431 | TXNRD1 |
| ENSG00000204315 | FKBPL | ENSG00000104979 | C19orf53 |
| ENSG00000187522 | HSPA14 | ENSG00000136709 | WDR33 |
| ENSG00000169375 | SIN3A | ENSG00000149100 | EIF3M |
| ENSG00000143748 | NVL | ENSG00000125835 | SNRPB |
| ENSG00000021776 | AQR | ENSG00000116698 | SMG7 |
| ENSG00000132467 | UTP3 | ENSG00000087586 | AURKA |
| ENSG00000087470 | DNM1L | ENSG00000169230 | PRELID1 |
| ENSG00000130811 | EIF3G | ENSG00000143799 | PARP1 |
| ENSG00000180198 | RCC1 | ENSG00000146731 | CCT6A |
| ENSG00000101407 | TTI1 | ENSG00000163877 | SNIP1 |
| ENSG00000116455 | WDR77 | ENSG00000215421 | ZNF407 |
| ENSG00000135763 | URB2 | ENSG00000197724 | PHF2 |
| ENSG00000133316 | WDR74 | ENSG00000172590 | MRPL52 |
| ENSG00000189091 | SF3B3 | ENSG00000175203 | DCTN2 |
| ENSG00000109917 | ZNF259 | ENSG00000149273 | RPS3 |
| ENSG00000130640 | TUBGCP2 | ENSG00000204822 | MRPL53 |
| ENSG00000011376 | LARS2 | ENSG00000109775 | UFSP2 |
| ENSG00000135249 | RINT1 | ENSG00000165733 | BMS1 |
| ENSG00000126883 | NUP214 | ENSG00000104671 | DCTN6 |
| ENSG00000163510 | CWC22 | ENSG00000175224 | ATG13 |
| ENSG00000101138 | CSTF1 | ENSG00000142541 | RPL13A |
| ENSG00000104221 | BRF2 | ENSG00000173805 | HAP1 |
| ENSG00000125630 | POLR1B | ENSG00000115750 | TAF1B |
| ENSG00000083896 | YTHDC1 | ENSG00000165688 | PMPCA |
| ENSG00000105726 | ATP13A1 | ENSG00000159720 | ATP6V0D1 |
| ENSG00000105618 | PRPF31 | ENSG00000074201 | CLNS1A |
| ENSG00000117748 | RPA2 | ENSG00000158417 | EIF5B |
| ENSG00000143294 | PRCC | ENSG00000196588 | MKL1 |
| ENSG00000156239 | N6AMT1 | ENSG00000138614 | VWA9 |
| ENSG00000143384 | MCL1 | ENSG00000124571 | XPO5 |
| ENSG00000113407 | TARS | ENSG00000198000 | NOL8 |
| ENSG00000086589 | RBM22 | ENSG00000181991 | MRPS11 |
| ENSG00000133119 | RFC3 | ENSG00000149823 | VPS51 |
| ENSG00000052749 | RRP12 | ENSG00000151348 | EXT2 |
| ENSG00000103047 | TANGO6 | ENSG00000162396 | PARS2 |
| ENSG00000142751 | GPN2 | ENSG00000204843 | DCTN1 |
| ENSG00000101057 | MYBL2 | ENSG00000177302 | TOP3A |
| ENSG00000176915 | ANKLE2 | ENSG00000142684 | ZNF593 |
| ENSG00000071127 | WDR1 | ENSG00000074800 | ENO1 |
| ENSG00000106344 | RBM28 | ENSG00000167513 | CDT1 |
| ENSG00000100316 | RPL3 | ENSG00000141101 | NOB1 |
| ENSG00000139131 | YARS2 | ENSG00000047315 | POLR2B |
| ENSG00000182831 | C16orf72 | ENSG00000131966 | ACTR10 |
| ENSG00000167325 | RRM1 | ENSG00000115875 | SRSF7 |
| ENSG00000172262 | ZNF131 | ENSG00000186141 | POLR3C |
| ENSG00000007168 | PAFAH1B1 | ENSG00000108424 | KPNB1 |
| ENSG00000117174 | ZNHIT6 | ENSG00000111845 | PAK1IP1 |
| ENSG00000196497 | IPO4 | ENSG00000148832 | PAOX |
| ENSG00000188566 | NDOR1 | ENSG00000156017 | C9orf41 |
| ENSG00000183091 | NEB | ENSG00000198901 | PRC1 |
| ENSG00000011304 | PTBP1 | ENSG00000134001 | EIF2S1 |
| ENSG00000109805 | NCAPG | ENSG00000146918 | NCAPG2 |
| ENSG00000123154 | WDR83 | ENSG00000144713 | RPL32 |
| ENSG00000147416 | ATP6V1B2 | ENSG00000185122 | HSF1 |
| ENSG00000163961 | RNF168 | ENSG00000167658 | EEF2 |
| ENSG00000163811 | WDR43 | ENSG00000164190 | NIPBL |
| ENSG00000143624 | INTS3 | ENSG00000163902 | RPN1 |
| ENSG00000101161 | PRPF6 | ENSG00000244045 | TMEM199 |
| ENSG00000130726 | TRIM28 | ENSG00000143476 | DTL |
| ENSG00000165494 | PCF11 | ENSG00000149503 | INCENP |
| ENSG00000053900 | ANAPC4 | ENSG00000071243 | ING3 |
| ENSG00000168255 | POLR2J3 | ENSG00000186073 | C15orf41 |
| ENSG00000129534 | MIS18BP1 | ENSG00000088836 | SLC4A11 |
| ENSG00000164754 | RAD21 | ENSG00000136273 | HUS1 |
| ENSG00000120158 | RCL1 | ENSG00000005007 | UPF1 |
| ENSG00000161016 | RPL8 | ENSG00000070010 | UFD1L |
| ENSG00000030066 | NUP160 | ENSG00000106263 | EIF3B |
| ENSG00000099624 | ATP5D | ENSG00000213024 | NUP62 |
| ENSG00000116120 | FARSB | ENSG00000067191 | CACNB1 |
| ENSG00000115233 | PSMD14 | ENSG00000179091 | CYC1 |
| ENSG00000086504 | MRPL28 | ENSG00000113312 | TTC1 |
| ENSG00000160752 | FDPS | ENSG00000085831 | TTC39A |
| ENSG00000049541 | RFC2 | ENSG00000118197 | DDX59 |
| ENSG00000148688 | RPP30 | ENSG00000134871 | COL4A2 |
| ENSG00000114573 | ATP6V1A | ENSG00000088986 | DYNLL1 |
| ENSG00000086200 | IPO11 | ENSG00000138778 | CENPE |
| ENSG00000119720 | NRDE2 | ENSG00000106244 | PDAP1 |
| ENSG00000058262 | SEC61A1 | ENSG00000177600 | RPLP2 |
| ENSG00000073111 | MCM2 | ENSG00000112081 | SRSF3 |
| ENSG00000138160 | KIF11 | ENSG00000100413 | POLR3H |
| ENSG00000215193 | PEX26 | ENSG00000172508 | CARNS1 |
| ENSG00000161057 | PSMC2 | ENSG00000147123 | NDUFB11 |
| ENSG00000187514 | PTMA | ENSG00000119953 | SMNDC1 |
| ENSG00000135829 | DHX9 | ENSG00000111640 | GAPDH |
| ENSG00000058729 | RIOK2 | ENSG00000117899 | MESDC2 |
| ENSG00000110330 | BIRC2 | ENSG00000075624 | ACTB |
| ENSG00000141759 | TXNL4A | ENSG00000163166 | IWS1 |
| ENSG00000166986 | MARS | ENSG00000114503 | NCBP2 |
| ENSG00000153774 | CFDP1 | ENSG00000198522 | GPN1 |
| ENSG00000130177 | CDC16 | ENSG00000099899 | TRMT2A |
| ENSG00000241553 | ARPC4 | ENSG00000181544 | FANCB |
| ENSG00000132604 | TERF2 | ENSG00000136982 | DSCC1 |
| ENSG00000114982 | KANSL3 | ENSG00000068366 | ACSL4 |
| ENSG00000213780 | GTF2H4 | ENSG00000062716 | VMP1 |
| ENSG00000139343 | SNRPF | ENSG00000111802 | TDP2 |
| ENSG00000101189 | MRGBP | ENSG00000185627 | PSMD13 |
| ENSG00000079246 | XRCC5 | ENSG00000020426 | MNAT1 |
| ENSG00000196943 | NOP9 | ENSG00000113734 | BNIP1 |
| ENSG00000122965 | RBM19 | ENSG00000102241 | HTATSF1 |
| ENSG00000132383 | RPA1 | ENSG00000160789 | LMNA |
| ENSG00000094880 | CDC23 | ENSG00000062822 | POLD1 |
| ENSG00000213639 | PPP1CB | ENSG00000168944 | CEP120 |
| ENSG00000109911 | ELP4 | ENSG00000139718 | SETD1B |
| ENSG00000180957 | PITPNB | ENSG00000132792 | CTNNBL1 |
| ENSG00000122257 | RBBP6 | ENSG00000173540 | GMPPB |
| ENSG00000173145 | NOC3L | ENSG00000128789 | PSMG2 |
| ENSG00000179115 | FARSA | ENSG00000196365 | LONP1 |
| ENSG00000105171 | POP4 | ENSG00000160214 | RRP1 |
| ENSG00000148303 | RPL7A | ENSG00000179041 | RRS1 |
| ENSG00000167508 | MVD | ENSG00000143106 | PSMA5 |
| ENSG00000115541 | HSPE1 | ENSG00000168411 | RFWD3 |
| ENSG00000170445 | HARS | ENSG00000073584 | SMARCE1 |
| ENSG00000168496 | FEN1 | ENSG00000175334 | BANF1 |
| ENSG00000141367 | CLTC | ENSG00000077152 | UBE2T |
| ENSG00000087191 | PSMC5 | ENSG00000173611 | SCAI |
| ENSG00000163159 | VPS72 | ENSG00000171720 | HDAC3 |
| ENSG00000130741 | EIF2S3 | ENSG00000182197 | EXT1 |
| ENSG00000168495 | POLR3D | ENSG00000114346 | ECT2 |
| ENSG00000071894 | CPSF1 | ENSG00000124214 | STAU1 |
| ENSG00000058600 | POLR3E | ENSG00000126254 | RBM42 |
| ENSG00000100726 | TELO2 | ENSG00000127184 | COX7C |
| ENSG00000165501 | LRR1 | ENSG00000174276 | ZNHIT2 |
| ENSG00000113575 | PPP2CA | ENSG00000177971 | IMP3 |
| ENSG00000116922 | C1orf109 | ENSG00000104872 | PIH1D1 |
| ENSG00000073712 | FERMT2 | ENSG00000132155 | RAF1 |
| ENSG00000174437 | ATP2A2 | ENSG00000163872 | YEATS2 |
| ENSG00000176407 | KCMF1 | ENSG00000119906 | FAM178A |
| ENSG00000140525 | FANCI | ENSG00000217930 | PAM16 |
| ENSG00000101182 | PSMA7 | ENSG00000197498 | RPF2 |
| ENSG00000130204 | TOMM40 | ENSG00000130348 | QRSL1 |
| ENSG00000239306 | RBM14 | ENSG00000147536 | GINS4 |
| ENSG00000248643 | RBM14-RBM4 | ENSG00000174748 | RPL15 |
| ENSG00000172113 | NME6 | ENSG00000159147 | DONSON |
| ENSG00000136448 | NMT1 | ENSG00000157593 | SLC35B2 |
| ENSG00000186166 | CCDC84 | ENSG00000181938 | GINS3 |
| ENSG00000166233 | ARIH1 | ENSG00000187446 | CHP1 |
| ENSG00000111877 | MCM9 | ENSG00000070371 | CLTCL1 |
| ENSG00000204316 | MRPL38 | ENSG00000096063 | SRPK1 |
| ENSG00000101868 | POLA1 | ENSG00000141564 | RPTOR |
| ENSG00000107951 | MTPAP | ENSG00000108474 | PIGL |
| ENSG00000039650 | PNKP | ENSG00000187741 | FANCA |
| ENSG00000123064 | DDX54 | ENSG00000213465 | ARL2 |
| ENSG00000183955 | SETD8 | ENSG00000117593 | DARS2 |
| ENSG00000138107 | ACTR1A | ENSG00000171863 | RPS7 |
| ENSG00000244005 | NFS1 | ENSG00000117395 | EBNA1BP2 |
| ENSG00000188986 | NELFB | ENSG00000111142 | METAP2 |
| ENSG00000018699 | TTC27 | ENSG00000113272 | THG1L |
| ENSG00000167112 | TRUB2 | ENSG00000117360 | PRPF3 |
| ENSG00000100393 | EP300 | ENSG00000221978 | CCNL2 |
| ENSG00000101639 | CEP192 | ENSG00000163832 | ELP6 |
| ENSG00000126461 | SCAF1 | ENSG00000108852 | MPP2 |
| ENSG00000172171 | TEFM | ENSG00000175832 | ETV4 |
| ENSG00000135913 | USP37 | ENSG00000185359 | HGS |
| ENSG00000135624 | CCT7 | ENSG00000120705 | ETF1 |
| ENSG00000100804 | PSMB5 | ENSG00000108384 | RAD51C |
| ENSG00000175792 | RUVBL1 | ENSG00000036257 | CUL3 |
| ENSG00000183431 | SF3A3 | ENSG00000152382 | TADA1 |
| ENSG00000108773 | KAT2A | ENSG00000114742 | WDR48 |
| ENSG00000100949 | RABGGTA | ENSG00000214026 | MRPL23 |
| ENSG00000151503 | NCAPD3 | ENSG00000105671 | DDX49 |
| ENSG00000111880 | RNGTT | ENSG00000104731 | KLHDC4 |
| ENSG00000168883 | USP39 | ENSG00000010256 | UQCRC1 |
| ENSG00000151461 | UPF2 | ENSG00000154743 | TSEN2 |
| ENSG00000105486 | LIG1 | ENSG00000178896 | EXOSC4 |
| ENSG00000111300 | NAA25 | ENSG00000168393 | DTYMK |
| ENSG00000144559 | TAMM41 | ENSG00000035928 | RFC1 |
| ENSG00000137574 | TGS1 | ENSG00000048707 | VPS13D |
| ENSG00000172273 | HINFP | ENSG00000154832 | CXXC1 |
| ENSG00000133112 | TPT1 | ENSG00000130985 | UBA1 |
| ENSG00000167986 | DDB1 | ENSG00000065150 | IPO5 |
| ENSG00000125319 | C17orf53 | ENSG00000161800 | RACGAP1 |
| ENSG00000113161 | HMGCR | ENSG00000142534 | RPS11 |
| ENSG00000100941 | PNN | ENSG00000136003 | ISCU |
| ENSG00000139697 | SBNO1 | ENSG00000065000 | AP3D1 |
| ENSG00000135336 | ORC3 | ENSG00000100401 | RANGAP1 |
| ENSG00000101115 | SALL4 | ENSG00000196230 | TUBB |
| ENSG00000100902 | PSMA6 | ENSG00000181555 | SETD2 |
| ENSG00000141141 | DDX52 | ENSG00000055950 | MRPL43 |
| ENSG00000254093 | PINX1 | ENSG00000188389 | PDCD1 |
| ENSG00000184445 | KNTC1 | ENSG00000165684 | SNAPC4 |
| ENSG00000089053 | ANAPC5 | ENSG00000147533 | GOLGA7 |
| ENSG00000111602 | TIMELESS | ENSG00000064313 | TAF2 |
| ENSG00000145592 | RPL37 | ENSG00000137154 | RPS6 |
| ENSG00000106615 | RHEB | ENSG00000104886 | PLEKHJ1 |
| ENSG00000180817 | PPA1 | ENSG00000122882 | ECD |
| ENSG00000110172 | CHORDC1 | ENSG00000184967 | NOC4L |
| ENSG00000137876 | RSL24D1 | ENSG00000088325 | TPX2 |
| ENSG00000104408 | EIF3E | ENSG00000183520 | UTP11L |
| ENSG00000143436 | MRPL9 | ENSG00000179051 | RCC2 |
| ENSG00000108883 | EFTUD2 | ENSG00000157510 | AFAP1L1 |
| ENSG00000140740 | UQCRC2 | ENSG00000066379 | ZNRD1 |
| ENSG00000211456 | SACM1L | ENSG00000172115 | CYCS |
| ENSG00000131051 | RBM39 | ENSG00000086827 | ZW10 |
| ENSG00000136758 | YME1L1 | ENSG00000109534 | GAR1 |
| ENSG00000112578 | BYSL | ENSG00000175387 | SMAD2 |
| ENSG00000163781 | TOPBP1 | ENSG00000115947 | ORC4 |
| ENSG00000106628 | POLD2 | ENSG00000010072 | SPRTN |
| ENSG00000132952 | USPL1 | ENSG00000185163 | DDX51 |
| ENSG00000168538 | TRAPPC11 | ENSG00000177370 | TIMM22 |
| ENSG00000168488 | ATXN2L | ENSG00000076924 | XAB2 |
| ENSG00000022277 | RTFDC1 | ENSG00000124562 | SNRPC |
| ENSG00000179988 | PSTK | ENSG00000127586 | CHTF18 |
| ENSG00000092199 | HNRNPC | ENSG00000066117 | SMARCD1 |
| ENSG00000156831 | NSMCE2 | ENSG00000177494 | ZBED2 |
| ENSG00000125691 | RPL23 | ENSG00000133401 | PDZD2 |
| ENSG00000083520 | DIS3 | ENSG00000127554 | GFER |
| ENSG00000115761 | NOL10 | ENSG00000117697 | NSL1 |
| ENSG00000173894 | CBX2 | ENSG00000184659 | FOXD4L4 |
| ENSG00000243147 | MRPL33 | ENSG00000204828 | FOXD4L2 |
| ENSG00000139618 | BRCA2 | ENSG00000110200 | ANAPC15 |
| ENSG00000109519 | GRPEL1 | ENSG00000169291 | SHE |
| ENSG00000203760 | CENPW | ENSG00000132313 | MRPL35 |
| ENSG00000166851 | PLK1 | ENSG00000115816 | CEBPZ |
| ENSG00000121579 | NAA50 | ENSG00000243667 | WDR92 |
| ENSG00000163608 | C3orf17 | ENSG00000107959 | PITRM1 |
| ENSG00000005075 | POLR2J | ENSG00000103035 | PSMD7 |
| ENSG00000148606 | POLR3A | ENSG00000163946 | FAM208A |
| ENSG00000160949 | TONSL | ENSG00000178057 | NDUFAF3 |
| ENSG00000128159 | TUBGCP6 | ENSG00000170540 | ARL6IP1 |
| ENSG00000125449 | ARMC7 | ENSG00000091009 | RBM27 |
| ENSG00000122406 | RPL5 | ENSG00000205609 | EIF3CL |
| ENSG00000126226 | PCID2 | ENSG00000165526 | RPUSD4 |
| ENSG00000159377 | PSMB4 | ENSG00000120314 | WDR55 |
| ENSG00000167967 | E4F1 | ENSG00000013275 | PSMC4 |
| ENSG00000141076 | CIRH1A | ENSG00000131931 | THAP1 |
| ENSG00000069248 | NUP133 | ENSG00000155660 | PDIA4 |
| ENSG00000242372 | EIF6 | ENSG00000162607 | USP1 |
| ENSG00000087269 | NOP14 | ENSG00000109606 | DHX15 |
| ENSG00000163468 | CCT3 | ENSG00000261949 | LOC100507003 |
| ENSG00000140326 | CDAN1 | ENSG00000130589 | HELZ2 |
| ENSG00000146834 | MEPCE | ENSG00000145734 | BDP1 |
| ENSG00000143222 | UFC1 | ENSG00000103194 | USP10 |
| ENSG00000110871 | COQ5 | ENSG00000076201 | PTPN23 |
| ENSG00000119285 | HEATR1 | ENSG00000140854 | KATNB1 |
| ENSG00000145386 | CCNA2 | ENSG00000164053 | ATRIP |
| ENSG00000164109 | MAD2L1 | ENSG00000167088 | SNRPD1 |
| ENSG00000185347 | C14orf80 | ENSG00000154781 | CCDC174 |
| ENSG00000134748 | PRPF38A | ENSG00000115446 | UNC50 |
| ENSG00000070061 | IKBKAP | ENSG00000177700 | POLR2L |
| ENSG00000099995 | SF3A1 | ENSG00000162063 | CCNF |
| ENSG00000100029 | PES1 | ENSG00000152904 | GGPS1 |
| ENSG00000130255 | RPL36 | ENSG00000151657 | KIN |
| ENSG00000085231 | AK6 | ENSG00000182810 | DDX28 |
| ENSG00000187145 | MRPS21 | ENSG00000006744 | ELAC2 |
| ENSG00000062650 | WAPAL | ENSG00000116898 | MRPS15 |
| ENSG00000122484 | RPAP2 | ENSG00000255072 | PIGY |
| ENSG00000090861 | AARS | ENSG00000130332 | LSM7 |
| ENSG00000161888 | SPC24 | ENSG00000051180 | RAD51 |
| ENSG00000087087 | SRRT | ENSG00000178171 | AMER3 |
| ENSG00000134910 | STT3A | ENSG00000254901 | MEF2BNB |
| ENSG00000161526 | SAP30BP | ENSG00000149925 | ALDOA |
| ENSG00000068654 | POLR1A | ENSG00000100604 | CHGA |
| ENSG00000140983 | RHOT2 | ENSG00000172602 | RND1 |
| ENSG00000184708 | EIF4ENIF1 | ENSG00000138592 | USP8 |
| ENSG00000100479 | POLE2 | ENSG00000172613 | RAD9A |
| ENSG00000134440 | NARS | ENSG00000132196 | HSD17B7 |
| ENSG00000014164 | ZC3H3 | ENSG00000151849 | CENPJ |
| ENSG00000113812 | ACTR8 | ENSG00000105221 | AKT2 |
| ENSG00000145331 | TRMT10A | ENSG00000185504 | C17orf70 |
| ENSG00000110104 | CCDC86 | ENSG00000025796 | SEC63 |
| ENSG00000164163 | ABCE1 | ENSG00000168438 | CDC40 |
| ENSG00000167863 | ATP5H | ENSG00000163918 | RFC4 |
| ENSG00000176946 | THAP4 | ENSG00000152147 | GEMIN6 |
| ENSG00000169251 | NMD3 | ENSG00000166887 | VPS39 |
| ENSG00000166226 | CCT2 | ENSG00000018625 | ATP1A2 |
| ENSG00000131747 | TOP2A | ENSG00000163346 | PBXIP1 |
| ENSG00000267673 | FDX1L | ENSG00000135966 | TGFBRAP1 |
| ENSG00000108559 | NUP88 | ENSG00000099901 | RANBP1 |
| ENSG00000104957 | CCDC130 | ENSG00000010327 | STAB1 |
| ENSG00000167522 | ANKRD11 | ENSG00000163344 | PMVK |
| ENSG00000130706 | ADRM1 | ENSG00000102921 | N4BP1 |
| ENSG00000048162 | NOP16 | ENSG00000177150 | FAM210A |
| ENSG00000159210 | SNF8 | ENSG00000158042 | MRPL17 |
| ENSG00000113360 | DROSHA | ENSG00000124659 | TBCC |
| ENSG00000108296 | CWC25 | ENSG00000113593 | PPWD1 |
| ENSG00000161395 | PGAP3 | ENSG00000188306 | LRRIQ4 |
| ENSG00000089195 | TRMT6 | ENSG00000074966 | TXK |
| ENSG00000185838 | GNB1L | ENSG00000228049 | POLR2J2 |
| ENSG00000101146 | RAE1 | ENSG00000133226 | SRRM1 |
| ENSG00000092853 | CLSPN | ENSG00000121577 | POPDC2 |
| ENSG00000107949 | BCCIP | ENSG00000130876 | SLC7A10 |
| ENSG00000159079 | C21orf59 | ENSG00000130810 | PPAN |
| ENSG00000137947 | GTF2B | ENSG00000243207 | PPAN-P2RY11 |
| ENSG00000160948 | VPS28 | ENSG00000081248 | CACNA1S |
| ENSG00000065427 | KARS | ENSG00000153201 | RANBP2 |
| ENSG00000102978 | POLR2C | ENSG00000126698 | DNAJC8 |
| ENSG00000182154 | MRPL41 | ENSG00000103018 | CYB5B |
| ENSG00000139168 | ZCRB1 | ENSG00000130816 | DNMT1 |
| ENSG00000175110 | MRPS22 | ENSG00000102103 | PQBP1 |
| ENSG00000177084 | POLE | ENSG00000120253 | NUP43 |
| ENSG00000197681 | TBC1D3 | ENSG00000164327 | RICTOR |
| ENSG00000053501 | USE1 | ENSG00000139719 | VPS33A |
| ENSG00000121879 | PIK3CA | ENSG00000168566 | SNRNP48 |
| ENSG00000108278 | ZNHIT3 | ENSG00000063244 | U2AF2 |
| ENSG00000161547 | SRSF2 | ENSG00000108423 | TUBD1 |
| ENSG00000129083 | COPB1 | ENSG00000164880 | INTS1 |
| ENSG00000012048 | BRCA1 | ENSG00000148297 | MED22 |
| ENSG00000171314 | PGAM1 | ENSG00000185825 | BCAP31 |
| ENSG00000112159 | MDN1 | ENSG00000084623 | EIF3I |
| ENSG00000174243 | DDX23 | ENSG00000066422 | ZBTB11 |
| ENSG00000096401 | CDC5L | ENSG00000119041 | GTF3C3 |
| ENSG00000128513 | POT1 | ENSG00000083093 | PALB2 |
| ENSG00000071859 | FAM50A | ENSG00000120699 | EXOSC8 |
| ENSG00000100084 | HIRA | ENSG00000166135 | HIF1AN |
| ENSG00000100813 | ACIN1 | ENSG00000188976 | NOC2L |
| ENSG00000005100 | DHX33 | ENSG00000102974 | CTCF |
| ENSG00000101158 | NELFCD | ENSG00000148229 | POLE3 |
| ENSG00000115946 | PNO1 | ENSG00000167118 | URM1 |
| ENSG00000188647 | PTAR1 | ENSG00000176386 | CDC26 |
| ENSG00000146007 | ZMAT2 | ENSG00000110063 | DCPS |
| ENSG00000241837 | ATP5O | ENSG00000089737 | DDX24 |
| ENSG00000113643 | RARS | ENSG00000119383 | PPP2R4 |
| ENSG00000162521 | RBBP4 | ENSG00000143319 | ISG20L2 |
| ENSG00000116830 | TTF2 | ENSG00000141552 | ANAPC11 |
| ENSG00000187555 | USP7 | ENSG00000155506 | LARP1 |
| ENSG00000137216 | TMEM63B | ENSG00000144867 | SRPRB |
| ENSG00000161904 | LEMD2 | ENSG00000093000 | NUP50 |
| ENSG00000241945 | PWP2 | ENSG00000107937 | GTPBP4 |
| ENSG00000134982 | APC | ENSG00000083635 | NUFIP1 |
| ENSG00000156983 | BRPF1 | ENSG00000174527 | MYO1H |
| ENSG00000164346 | NSA2 | ENSG00000124641 | MED20 |
| ENSG00000223496 | EXOSC6 | ENSG00000240694 | PNMA2 |
| ENSG00000113569 | NUP155 | ENSG00000122012 | SV2C |
| ENSG00000080986 | NDC80 | ENSG00000017260 | ATP2C1 |
| ENSG00000143374 | TARS2 | ENSG00000179965 | ZNF771 |
| ENSG00000104835 | SARS2 | ENSG00000126216 | TUBGCP3 |
| ENSG00000152253 | SPC25 | ENSG00000126814 | TRMT5 |
| ENSG00000088356 | PDRG1 | ENSG00000101945 | SUV39H1 |
| ENSG00000044574 | HSPA5 | ENSG00000182185 | RAD51B |
| ENSG00000116874 | WARS2 | ENSG00000163681 | SLMAP |
| ENSG00000204531 | POU5F1 | ENSG00000179295 | PTPN11 |
| ENSG00000004779 | NDUFAB1 | ENSG00000004487 | KDM1A |
| ENSG00000161981 | SNRNP25 | ENSG00000136100 | VPS36 |
| ENSG00000126457 | PRMT1 | ENSG00000168066 | SF1 |
| ENSG00000142507 | PSMB6 | ENSG00000197181 | PIWIL2 |
| ENSG00000164808 | SPIDR | ENSG00000128908 | INO80 |
| ENSG00000234972 | TBC1D3C | ENSG00000102144 | PGK1 |
| ENSG00000144554 | FANCD2 | ENSG00000007923 | DNAJC11 |
| ENSG00000147383 | NSDHL | ENSG00000143514 | TP53BP2 |
| ENSG00000165732 | DDX21 | ENSG00000076650 | GPATCH1 |
| ENSG00000155975 | VPS37A | ENSG00000130749 | ZC3H4 |
| ENSG00000002822 | MAD1L1 | ENSG00000062582 | MRPS24 |
| ENSG00000179271 | GADD45GIP1 | ENSG00000087085 | ACHE |
| ENSG00000101452 | DHX35 | ENSG00000197976 | AKAP17A |
| ENSG00000074071 | MRPS34 | ENSG00000100028 | SNRPD3 |
| ENSG00000169045 | HNRNPH1 | ENSG00000128731 | HERC2 |
| ENSG00000087510 | TFAP2C | ENSG00000134014 | ELP3 |
| ENSG00000105819 | PMPCB | ENSG00000181163 | NPM1 |
| ENSG00000204351 | SKIV2L | ENSG00000148444 | COMMD3 |
| ENSG00000160783 | PMF1 | ENSG00000095319 | NUP188 |
| ENSG00000152234 | ATP5A1 | ENSG00000169564 | PCBP1 |
| ENSG00000127463 | EMC1 | ENSG00000182208 | MOB2 |
| ENSG00000124228 | DDX27 | ENSG00000055070 | SZRD1 |
| ENSG00000100319 | ZMAT5 | ENSG00000182473 | EXOC7 |
| ENSG00000065183 | WDR3 | ENSG00000136930 | PSMB7 |
| ENSG00000058272 | PPP1R12A | ENSG00000107863 | ARHGAP21 |
| ENSG00000136628 | EPRS | ENSG00000197223 | C1D |
| ENSG00000163017 | ACTG2 | ENSG00000184270 | HIST2H2AB |
| ENSG00000104884 | ERCC2 | ENSG00000161036 | LRWD1 |
| ENSG00000166483 | WEE1 | ENSG00000144736 | SHQ1 |
| ENSG00000135837 | CEP350 | ENSG00000137100 | DCTN3 |
| ENSG00000104897 | SF3A2 | ENSG00000131149 | GSE1 |
| ENSG00000140598 | EFTUD1 | ENSG00000214753 | HNRNPUL2 |
| ENSG00000143774 | GUK1 | ENSG00000111358 | GTF2H3 |
| ENSG00000085721 | RRN3 | ENSG00000147677 | EIF3H |
| ENSG00000172053 | QARS | ENSG00000125676 | THOC2 |
| ENSG00000165934 | CPSF2 | ENSG00000149554 | CHEK1 |
| ENSG00000052802 | MSMO1 | ENSG00000176476 | CCDC101 |
| ENSG00000135476 | ESPL1 | ENSG00000147596 | PRDM14 |
| ENSG00000174177 | CTU2 | ENSG00000092094 | OSGEP |
| ENSG00000120438 | TCP1 | ENSG00000155393 | HEATR3 |
| ENSG00000170892 | TSEN34 | ENSG00000083845 | RPS5 |
| ENSG00000204574 | ABCF1 | ENSG00000148296 | SURF6 |
| ENSG00000175376 | EIF1AD | ENSG00000162613 | FUBP1 |
| ENSG00000146263 | MMS22L | ENSG00000182220 | ATP6AP2 |
| ENSG00000121022 | COPS5 | ENSG00000115163 | CENPA |
| ENSG00000168090 | COPS6 | ENSG00000176225 | RTTN |
| ENSG00000167491 | GATAD2A | ENSG00000176208 | ATAD5 |
| ENSG00000084072 | PPIE | ENSG00000254827 | SLC22A18AS |
| ENSG00000115268 | RPS15 | ENSG00000128708 | HAT1 |
| ENSG00000163938 | GNL3 | ENSG00000106400 | ZNHIT1 |
| ENSG00000151665 | PIGF | ENSG00000123219 | CENPK |
| ENSG00000148843 | PDCD11 | ENSG00000264424 | MYH4 |
| ENSG00000141736 | ERBB2 | ENSG00000066468 | FGFR2 |
| ENSG00000103168 | TAF1C | ENSG00000095059 | DHPS |
| ENSG00000105401 | CDC37 | ENSG00000110921 | MVK |
| ENSG00000163933 | RFT1 | ENSG00000141556 | TBCD |
| ENSG00000122085 | MTERFD2 | ENSG00000196305 | IARS |
| ENSG00000164032 | H2AFZ | ENSG00000131055 | COX4I2 |
| ENSG00000140943 | MBTPS1 | ENSG00000153789 | FAM92B |
| ENSG00000198952 | SMG5 | ENSG00000088930 | XRN2 |
| ENSG00000169021 | UQCRFS1 | ENSG00000145220 | LYAR |
| ENSG00000013810 | TACC3 | ENSG00000172809 | RPL38 |
| ENSG00000105258 | POLR2I | ENSG00000108788 | MLX |
| ENSG00000167978 | SRRM2 | ENSG00000197170 | PSMD12 |
| ENSG00000095564 | BTAF1 | ENSG00000225899 | FRG2B |
| ENSG00000138095 | LRPPRC | ENSG00000174886 | NDUFA11 |
| ENSG00000063978 | RNF4 | ENSG00000172058 | SERF1A |
| ENSG00000162368 | CMPK1 | ENSG00000205572 | SERF1B |
| ENSG00000140829 | DHX38 | ENSG00000242485 | MRPL20 |
| ENSG00000158169 | FANCC | ENSG00000089225 | TBX5 |
| ENSG00000161960 | EIF4A1 | ENSG00000149428 | HYOU1 |
| ENSG00000181222 | POLR2A | ENSG00000166595 | FAM96B |
| ENSG00000165916 | PSMC3 | ENSG00000131462 | TUBG1 |
| ENSG00000198060 | MARCH5 | ENSG00000185990 | F8A3 |
| ENSG00000149923 | PPP4C | ENSG00000197932 | F8A1 |
| ENSG00000111667 | USP5 | ENSG00000198444 | F8A2 |
| ENSG00000198755 | RPL10A | ENSG00000031823 | RANBP3 |
| ENSG00000141499 | WRAP53 | ENSG00000100353 | EIF3D |
| ENSG00000093009 | CDC45 | ENSG00000163605 | PPP4R2 |
| ENSG00000105732 | ZNF574 | ENSG00000164162 | ANAPC10 |
| ENSG00000104064 | GABPB1 | ENSG00000132153 | DHX30 |
| ENSG00000108294 | PSMB3 | ENSG00000154723 | ATP5J |
| ENSG00000130856 | ZNF236 | ENSG00000182256 | GABRG3 |
| ENSG00000133980 | VRTN | ENSG00000119487 | MAPKAP1 |
| ENSG00000149308 | NPAT | ENSG00000132394 | EEFSEC |
| ENSG00000120071 | KANSL1 | ENSG00000122952 | ZWINT |
| ENSG00000129084 | PSMA1 | ENSG00000131042 | LILRB2 |
| ENSG00000117877 | CD3EAP | ENSG00000222004 | C7orf71 |
| ENSG00000127616 | SMARCA4 | ENSG00000168802 | CHTF8 |
| ENSG00000163882 | POLR2H | ENSG00000069849 | ATP1B3 |
| ENSG00000183718 | TRIM52 | ENSG00000074582 | BCS1L |
| ENSG00000106803 | SEC61B | ENSG00000103126 | AXIN1 |
| ENSG00000114942 | EEF1B2 | ENSG00000187144 | SPATA21 |
| ENSG00000067704 | IARS2 | ENSG00000221914 | PPP2R2A |
| ENSG00000114686 | MRPL3 | ENSG00000163386 | NBPF10 |
| ENSG00000172315 | TP53RK | ENSG00000134987 | WDR36 |
| ENSG00000173120 | KDM2A | ENSG00000132300 | PTCD3 |
| ENSG00000138442 | WDR12 | ENSG00000156931 | VPS8 |
| ENSG00000145982 | FARS2 | ENSG00000165632 | TAF3 |
| ENSG00000117481 | NSUN4 | ENSG00000044115 | CTNNA1 |
| ENSG00000142676 | RPL11 | ENSG00000035403 | VCL |
| ENSG00000164615 | CAMLG | ENSG00000088256 | GNA11 |
| ENSG00000138073 | PREB | ENSG00000164334 | FAM170A |
| ENSG00000136888 | ATP6V1G1 | ENSG00000166225 | FRS2 |
| ENSG00000221829 | FANCG | ENSG00000241186 | TDGF1 |
| ENSG00000198887 | SMC5 | ENSG00000196374 | HIST1H2BM |
| ENSG00000102900 | NUP93 | ENSG00000117614 | SYF2 |
| ENSG00000108344 | PSMD3 | ENSG00000154222 | CC2D1B |
| ENSG00000023191 | RNH1 | ENSG00000101367 | MAPRE1 |
| ENSG00000143621 | ILF2 | ENSG00000188186 | LAMTOR4 |
| ENSG00000112855 | HARS2 | ENSG00000166924 | NYAP1 |
| ENSG00000110536 | PTPMT1 | ENSG00000079805 | DNM2 |
| ENSG00000165629 | ATP5C1 | ENSG00000011260 | UTP18 |
| ENSG00000166847 | DCTN5 | ENSG00000089685 | BIRC5 |
| ENSG00000104852 | SNRNP70 | ENSG00000123908 | AGO2 |
| ENSG00000203814 | HIST2H2BF | ENSG00000057935 | MTA3 |
| ENSG00000009413 | REV3L | ENSG00000100811 | YY1 |
| ENSG00000130772 | MED18 | ENSG00000064102 | ASUN |
| ENSG00000079313 | REXO1 | ENSG00000006025 | OSBPL7 |
| ENSG00000012061 | ERCC1 | ENSG00000107372 | ZFAND5 |
| ENSG00000111642 | CHD4 | ENSG00000172922 | RNASEH2C |
| ENSG00000100462 | PRMT5 | ENSG00000075089 | ACTR6 |
| ENSG00000174100 | MRPL45 | ENSG00000165119 | HNRNPK |
| ENSG00000101421 | CHMP4B | ENSG00000182518 | FAM104B |
| ENSG00000144028 | SNRNP200 | ENSG00000041802 | LSG1 |
| ENSG00000108592 | FTSJ3 | ENSG00000206557 | TRIM71 |
| ENSG00000110048 | OSBP | ENSG00000124140 | SLC12A5 |
| ENSG00000147403 | RPL10 | ENSG00000063046 | EIF4B |
| ENSG00000198783 | ZNF830 | ENSG00000126581 | BECN1 |
| ENSG00000179409 | GEMIN4 | ENSG00000171530 | TBCA |
| ENSG00000147604 | RPL7 | ENSG00000206127 | GOLGA8O |
| ENSG00000136824 | SMC2 | ENSG00000167842 | MIS12 |
| ENSG00000104889 | RNASEH2A | ENSG00000033011 | ALG1 |
| ENSG00000146282 | RARS2 | ENSG00000146670 | CDCA5 |
| ENSG00000068784 | SRBD1 | ENSG00000198856 | OSTC |
| ENSG00000137822 | TUBGCP4 | ENSG00000111605 | CPSF6 |
| ENSG00000059691 | PET112 | ENSG00000087365 | SF3B2 |
| ENSG00000066827 | ZFAT | ENSG00000135845 | PIGC |
| ENSG00000148308 | GTF3C5 | ENSG00000100220 | RTCB |
| ENSG00000170185 | USP38 | ENSG00000131876 | SNRPA1 |
| ENSG00000160201 | U2AF1 | ENSG00000115392 | FANCL |
| ENSG00000141258 | SGSM2 | ENSG00000078618 | NRD1 |
| ENSG00000172660 | TAF15 | ENSG00000025770 | NCAPH2 |
| ENSG00000145833 | DDX46 | ENSG00000117682 | DHDDS |
| ENSG00000104980 | TIMM44 | ENSG00000198844 | ARHGEF15 |
| ENSG00000097046 | CDC7 | ENSG00000132603 | NIP7 |
| ENSG00000131368 | MRPS25 | ENSG00000162377 | SELRC1 |
| ENSG00000204209 | DAXX | ENSG00000137411 | VARS2 |
| ENSG00000129696 | TTI2 | ENSG00000064886 | CHI3L2 |
| ENSG00000108848 | LUC7L3 | ENSG00000137806 | NDUFAF1 |
| ENSG00000013573 | DDX11 | ENSG00000133030 | MPRIP |
| ENSG00000105248 | CCDC94 | ENSG00000136935 | GOLGA1 |
| ENSG00000183598 | HIST2H3D | ENSG00000243927 | MRPS6 |
| ENSG00000224226 | TBC1D3B | ENSG00000046647 | GEMIN8 |
| ENSG00000090470 | PDCD7 | ENSG00000133124 | IRS4 |
| ENSG00000031698 | SARS | ENSG00000255346 | NOX5 |
| ENSG00000108270 | AATF | ENSG00000103275 | UBE2I |
| ENSG00000159111 | MRPL10 | ENSG00000165502 | RPL36AL |
| ENSG00000149806 | FAU | ENSG00000100056 | DGCR14 |
| ENSG00000188739 | RBM34 | ENSG00000167972 | ABCA3 |
| ENSG00000152684 | PELO | ENSG00000053372 | MRTO4 |
| ENSG00000174374 | WBSCR16 | ENSG00000169813 | HNRNPF |
| ENSG00000107036 | KIAA1432 | ENSG00000198258 | UBL5 |
| ENSG00000204619 | PPP1R11 | ENSG00000103245 | NARFL |
| ENSG00000091651 | ORC6 | ENSG00000183513 | COA5 |
| ENSG00000134480 | CCNH | ENSG00000174547 | MRPL11 |
| ENSG00000164151 | KIAA0947 | ENSG00000173457 | PPP1R14B |
| ENSG00000164611 | PTTG1 | ENSG00000088038 | CNOT3 |
| ENSG00000111445 | RFC5 | ENSG00000115539 | PDCL3 |
| ENSG00000127481 | UBR4 | ENSG00000118181 | RPS25 |
| ENSG00000159352 | PSMD4 | ENSG00000160075 | SSU72 |
| ENSG00000137814 | HAUS2 | ENSG00000257949 | TEN1 |
| ENSG00000105220 | GPI | ENSG00000168028 | RPSA |
| ENSG00000140521 | POLG | ENSG00000213066 | FGFR1OP |
| ENSG00000075856 | SART3 | ENSG00000143228 | NUF2 |
| ENSG00000143742 | SRP9 | ENSG00000137413 | TAF8 |
| ENSG00000163029 | SMC6 | ENSG00000124207 | CSE1L |
| ENSG00000162227 | TAF6L | ENSG00000080815 | PSEN1 |
| ENSG00000100129 | EIF3L | ENSG00000132773 | TOE1 |
| ENSG00000170348 | TMED10 | ENSG00000129460 | NGDN |
| ENSG00000182217 | HIST2H4B | ENSG00000188613 | NANOS1 |
| ENSG00000183941 | HIST2H4A | ENSG00000163636 | PSMD6 |
| ENSG00000116221 | MRPL37 | ENSG00000146232 | NFKBIE |
| ENSG00000196235 | SUPT5H | ENSG00000135902 | CHRND |
| ENSG00000161920 | MED11 | ENSG00000143641 | GALNT2 |
| ENSG00000134690 | CDCA8 | ENSG00000073969 | NSF |
| ENSG00000131153 | GINS2 | ENSG00000041982 | TNC |
| ENSG00000138018 | EPT1 | ENSG00000108256 | NUFIP2 |
| ENSG00000173141 | MRP63 | ENSG00000198911 | SREBF2 |
| ENSG00000154727 | GABPA | ENSG00000141385 | AFG3L2 |
| ENSG00000120800 | UTP20 | ENSG00000176108 | CHMP6 |
| ENSG00000114767 | RRP9 | ENSG00000257365 | FNTB |
| ENSG00000174231 | PRPF8 | ENSG00000186487 | MYT1L |
| ENSG00000137547 | MRPL15 | ENSG00000127423 | AUNIP |
| ENSG00000146576 | C7orf26 | ENSG00000112110 | MRPL18 |
| ENSG00000065268 | WDR18 | ENSG00000114650 | SCAP |
| ENSG00000147162 | OGT | ENSG00000178104 | PDE4DIP |
| ENSG00000198917 | C9orf114 | ENSG00000105656 | ELL |
| ENSG00000180822 | PSMG4 | ENSG00000186393 | KRT26 |
| ENSG00000125977 | EIF2S2 | ENSG00000124541 | RRP36 |
| ENSG00000173418 | NAA20 | ENSG00000182108 | DEXI |
| ENSG00000155561 | NUP205 | ENSG00000139133 | ALG10 |
| ENSG00000173545 | ZNF622 | ENSG00000082068 | WDR70 |
| ENSG00000127993 | RBM48 | ENSG00000151388 | ADAMTS12 |
| ENSG00000197102 | DYNC1H1 | ENSG00000172172 | MRPL13 |
| ENSG00000119392 | GLE1 | ENSG00000184979 | USP18 |
| ENSG00000174444 | RPL4 | ENSG00000239857 | GET4 |
| ENSG00000149716 | ORAOV1 | ENSG00000069345 | DNAJA2 |
| ENSG00000155876 | RRAGA | ENSG00000073050 | XRCC1 |
| ENSG00000198841 | KTI12 | ENSG00000070985 | TRPM5 |
| ENSG00000056097 | ZFR | ENSG00000158715 | SLC45A3 |
| ENSG00000227057 | WDR46 | ENSG00000172062 | SMN1 |
| ENSG00000167670 | CHAF1A | ENSG00000205571 | SMN2 |
| ENSG00000127191 | TRAF2 | ENSG00000113141 | IK |
| ENSG00000072506 | HSD17B10 | ENSG00000186105 | LRRC70 |
| ENSG00000215021 | PHB2 | ENSG00000157895 | C12orf43 |
| ENSG00000175467 | SART1 | ENSG00000166441 | RPL27A |
| ENSG00000121073 | SLC35B1 | ENSG00000106346 | USP42 |
| ENSG00000079459 | FDFT1 | ENSG00000185379 | RAD51D |
| ENSG00000143493 | INTS7 | ENSG00000116667 | C1orf21 |
| ENSG00000141543 | EIF4A3 | ENSG00000176444 | CLK2 |
| ENSG00000174197 | MGA | ENSG00000105472 | CLEC11A |
| ENSG00000131269 | ABCB7 | ENSG00000065613 | SLK |
| ENSG00000089009 | RPL6 | ENSG00000005156 | LIG3 |
| ENSG00000197780 | TAF13 | ENSG00000125459 | MSTO1 |
| ENSG00000036549 | ZZZ3 | ENSG00000139146 | FAM60A |
| ENSG00000066135 | KDM4A | ENSG00000060069 | CTDP1 |
| ENSG00000176473 | WDR25 | ENSG00000130935 | NOL11 |
| ENSG00000124614 | RPS10 | ENSG00000115677 | HDLBP |
| ENSG00000107581 | EIF3A | ENSG00000105254 | TBCB |
| ENSG00000084463 | WBP11 | ENSG00000075539 | FRYL |
| ENSG00000137656 | BUD13 | ENSG00000196747 | HIST1H2AI |
| ENSG00000183751 | TBL3 | ENSG00000181513 | ACBD4 |
| ENSG00000119537 | KDSR | ENSG00000153107 | ANAPC1 |
| ENSG00000204220 | PFDN6 | ENSG00000160211 | G6PD |
| ENSG00000170291 | ELP5 | ENSG00000111481 | COPZ1 |
| ENSG00000198563 | DDX39B | ENSG00000070761 | C16orf80 |
| ENSG00000077549 | CAPZB | ENSG00000168924 | LETM1 |
| ENSG00000255529 | POLR2M | ENSG00000105058 | FAM32A |
| ENSG00000100034 | PPM1F | ENSG00000204569 | PPP1R10 |
| ENSG00000196367 | TRRAP | ENSG00000153914 | SREK1 |
| ENSG00000167258 | CDK12 | ENSG00000161509 | GRIN2C |
| ENSG00000039123 | SKIV2L2 | ENSG00000162702 | ZNF281 |
| ENSG00000076043 | REXO2 | ENSG00000004939 | SLC4A1 |
| ENSG00000213676 | ATF6B | ENSG00000139620 | KANSL2 |
| ENSG00000058453 | CROCC | ENSG00000025293 | PHF20 |
| ENSG00000153575 | TUBGCP5 | ENSG00000158545 | ZC3H18 |
| ENSG00000110700 | RPS13 | ENSG00000142546 | NOSIP |
| ENSG00000101181 | MTG2 | ENSG00000143398 | PIP5K1A |
| ENSG00000071539 | TRIP13 | ENSG00000197958 | RPL12 |
| ENSG00000075702 | WDR62 | ENSG00000067225 | PKM |
| ENSG00000171453 | POLR1C | ENSG00000172534 | HCFC1 |
| ENSG00000090989 | EXOC1 | ENSG00000155438 | MKI67IP |
| ENSG00000037897 | METTL1 | ENSG00000166582 | CENPV |
| ENSG00000095139 | ARCN1 | ENSG00000145912 | NHP2 |
| ENSG00000078142 | PIK3C3 | ENSG00000180992 | MRPL14 |
| ENSG00000141030 | COPS3 | ENSG00000118705 | RPN2 |
| ENSG00000126249 | PDCD2L | ENSG00000163161 | ERCC3 |
| ENSG00000117408 | IPO13 | ENSG00000136819 | C9orf78 |
| ENSG00000130725 | UBE2M | ENSG00000124787 | RPP40 |
| ENSG00000175054 | ATR | ENSG00000179104 | TMTC2 |
| ENSG00000149016 | TUT1 | ENSG00000140694 | PARN |
| ENSG00000165060 | FXN | ENSG00000143751 | SDE2 |
| ENSG00000117597 | DIEXF | ENSG00000136997 | MYC |
| ENSG00000185085 | INTS5 | ENSG00000147274 | RBMX |
| ENSG00000113595 | TRIM23 | ENSG00000084693 | AGBL5 |
| ENSG00000040633 | PHF23 | ENSG00000165271 | NOL6 |
| ENSG00000178952 | TUFM | ENSG00000221838 | AP4M1 |
| ENSG00000120539 | MASTL | ENSG00000171444 | MCC |
| ENSG00000103549 | RNF40 | ENSG00000101882 | NKAP |
| ENSG00000119723 | COQ6 | ENSG00000186847 | KRT14 |
| ENSG00000171311 | EXOSC1 | ENSG00000014824 | SLC30A9 |
| ENSG00000106245 | BUD31 | ENSG00000166685 | COG1 |
| ENSG00000118046 | STK11 | ENSG00000108349 | CASC3 |
| ENSG00000125484 | GTF3C4 | ENSG00000175216 | CKAP5 |
| ENSG00000089094 | KDM2B | ENSG00000259494 | MRPL46 |
| ENSG00000121621 | KIF18A | ENSG00000028310 | BRD9 |
| ENSG00000129911 | KLF16 | ENSG00000136450 | SRSF1 |
| ENSG00000102302 | FGD1 | ENSG00000204859 | ZBTB48 |
| ENSG00000135679 | MDM2 | ENSG00000165209 | STRBP |
| ENSG00000185115 | NDNL2 | ENSG00000163466 | ARPC2 |
| ENSG00000140553 | UNC45A | ENSG00000125485 | DDX31 |
| ENSG00000129562 | DAD1 | ENSG00000070778 | PTPN21 |
| ENSG00000100138 | NHP2L1 | ENSG00000126001 | CEP250 |
| ENSG00000111641 | NOP2 | ENSG00000169249 | ZRSR2 |
| ENSG00000173660 | UQCRH | ENSG00000111011 | RSRC2 |
| ENSG00000198677 | TTC37 | ENSG00000139496 | NUPL1 |
| ENSG00000135503 | ACVR1B | ENSG00000131746 | TNS4 |
| ENSG00000180998 | GPR137C | ENSG00000061936 | SFSWAP |
| ENSG00000153187 | HNRNPU | ENSG00000196584 | XRCC2 |
| ENSG00000106459 | NRF1 | ENSG00000168286 | THAP11 |
| ENSG00000156261 | CCT8 | ENSG00000119787 | ATL2 |
| ENSG00000118363 | SPCS2 | ENSG00000182446 | NPLOC4 |
| ENSG00000164134 | NAA15 | ENSG00000071462 | WBSCR22 |
| ENSG00000060642 | PIGV | ENSG00000213397 | HAUS7 |
| ENSG00000090889 | KIF4A | ENSG00000178028 | DMAP1 |
| ENSG00000101361 | NOP56 | ENSG00000067596 | DHX8 |
| ENSG00000167792 | NDUFV1 | ENSG00000198015 | MRPL42 |
| ENSG00000184162 | NR2C2AP | ENSG00000133706 | LARS |
| ENSG00000128524 | ATP6V1F | ENSG00000149635 | OCSTAMP |
| ENSG00000100387 | RBX1 | ENSG00000117505 | DR1 |
| ENSG00000110906 | KCTD10 | ENSG00000155868 | MED7 |
| ENSG00000147457 | CHMP7 | ENSG00000129197 | RPAIN |
| ENSG00000124570 | SERPINB6 | ENSG00000065978 | YBX1 |
| ENSG00000186468 | RPS23 | ENSG00000260238 | PMF1-BGLAP |
| ENSG00000136122 | BORA | ENSG00000178988 | MRFAP1L1 |
| ENSG00000047249 | ATP6V1H | ENSG00000168005 | C11orf84 |
| ENSG00000127804 | METTL16 | ENSG00000162408 | NOL9 |
| ENSG00000104412 | EMC2 | ENSG00000140350 | ANP32A |
| ENSG00000173726 | TOMM20 | ENSG00000261796 | ISY1-RAB43 |
| ENSG00000138777 | PPA2 | ENSG00000174405 | LIG4 |
| ENSG00000170043 | TRAPPC1 | ENSG00000197414 | GOLGA6L1 |
| ENSG00000124486 | USP9X | ENSG00000116062 | MSH6 |
| ENSG00000105705 | SUGP1 | ENSG00000116906 | GNPAT |
| ENSG00000223501 | VPS52 | ENSG00000134597 | RBMX2 |
| ENSG00000107815 | C10orf2 | ENSG00000071994 | PDCD2 |
| ENSG00000100109 | TFIP11 | ENSG00000112742 | TTK |
| ENSG00000136271 | DDX56 | ENSG00000106636 | YKT6 |
| ENSG00000146830 | GIGYF1 | ENSG00000101773 | RBBP8 |
| ENSG00000198382 | UVRAG | ENSG00000103061 | SLC7A6OS |
| ENSG00000160285 | LSS | ENSG00000140259 | MFAP1 |
| ENSG00000137770 | CTDSPL2 | ENSG00000197077 | KIAA1671 |
| ENSG00000116670 | MAD2L2 | ENSG00000204435 | CSNK2B |
| ENSG00000165280 | VCP | ENSG00000055130 | CUL1 |
| ENSG00000183963 | SMTN | ENSG00000100209 | HSCB |
| ENSG00000164961 | KIAA0196 | ENSG00000113048 | MRPS27 |
| ENSG00000157216 | SSBP3 | ENSG00000189403 | HMGB1 |
| ENSG00000129932 | DOHH | ENSG00000173011 | TADA2B |
| ENSG00000167721 | TSR1 | ENSG00000169836 | TACR3 |
| ENSG00000188352 | FOCAD | ENSG00000133816 | MICAL2 |
| ENSG00000104853 | CLPTM1 | ENSG00000141452 | C18orf8 |
| ENSG00000185883 | ATP6V0C | ENSG00000006715 | VPS41 |
| ENSG00000100519 | PSMC6 | ENSG00000136518 | ACTL6A |
| ENSG00000110107 | PRPF19 | ENSG00000100297 | MCM5 |
| ENSG00000184203 | PPP1R2 | ENSG00000165898 | ISCA2 |
| ENSG00000148824 | MTG1 | ENSG00000156384 | SFR1 |
| ENSG00000113810 | SMC4 | ENSG00000145414 | NAF1 |
| ENSG00000121152 | NCAPH | ENSG00000101972 | STAG2 |
| ENSG00000241127 | YAE1D1 | ENSG00000112658 | SRF |
| ENSG00000139197 | PEX5 | ENSG00000162736 | NCSTN |
| ENSG00000101464 | PIGU | ENSG00000103266 | STUB1 |
| ENSG00000132676 | DAP3 | ENSG00000008018 | PSMB1 |
| ENSG00000135972 | MRPS9 | ENSG00000149506 | ZP1 |
| ENSG00000089157 | RPLP0 | ENSG00000111530 | CAND1 |
| ENSG00000138035 | PNPT1 | ENSG00000027001 | MIPEP |
| ENSG00000171824 | EXOSC10 | ENSG00000152266 | PTH |
| ENSG00000153179 | RASSF3 | ENSG00000154174 | TOMM70A |
| ENSG00000110713 | NUP98 | ENSG00000164045 | CDC25A |
| ENSG00000100865 | CINP | ENSG00000164758 | MED30 |
| ENSG00000136045 | PWP1 | ENSG00000160401 | C9orf117 |
| ENSG00000167526 | RPL13 | ENSG00000155959 | VBP1 |
| ENSG00000088766 | CRLS1 | ENSG00000105409 | ATP1A3 |
| ENSG00000103510 | KAT8 | ENSG00000175106 | TVP23C |
| ENSG00000143368 | SF3B4 | ENSG00000185950 | IRS2 |
| ENSG00000156697 | UTP14A | ENSG00000149256 | TENM4 |
| ENSG00000176248 | ANAPC2 | ENSG00000116957 | TBCE |
| ENSG00000188786 | MTF1 | ENSG00000154719 | MRPL39 |
| ENSG00000175756 | AURKAIP1 | ENSG00000105364 | MRPL4 |
| ENSG00000140395 | WDR61 | ENSG00000198218 | QRICH1 |
| ENSG00000113368 | LMNB1 | ENSG00000013503 | POLR3B |
| ENSG00000060339 | CCAR1 | ENSG00000126756 | UXT |
| ENSG00000162385 | MAGOH | ENSG00000184988 | TMEM106A |
| ENSG00000105372 | RPS19 | ENSG00000186432 | KPNA4 |
| ENSG00000083312 | TNPO1 | ENSG00000156304 | SCAF4 |
| ENSG00000100142 | POLR2F | ENSG00000090565 | RAB11FIP3 |
| ENSG00000204560 | DHX16 | ENSG00000163508 | EOMES |
| ENSG00000197771 | MCMBP | ENSG00000147003 | TMEM27 |
| ENSG00000099817 | POLR2E | ENSG00000198730 | CTR9 |
| ENSG00000161980 | POLR3K | ENSG00000105321 | CCDC9 |
| ENSG00000117133 | RPF1 | ENSG00000120333 | MRPS14 |
| ENSG00000125901 | MRPS26 | ENSG00000121680 | PEX16 |
| ENSG00000168827 | GFM1 | ENSG00000088205 | DDX18 |
| ENSG00000161513 | FDXR | ENSG00000132432 | SEC61G |
| ENSG00000137818 | RPLP1 | ENSG00000186329 | TMEM212 |
| ENSG00000150990 | DHX37 | ENSG00000094804 | CDC6 |
| ENSG00000061794 | MRPS35 | ENSG00000169084 | DHRSX |
| ENSG00000143155 | TIPRL | ENSG00000107618 | RBP3 |
| ENSG00000253626 | EIF5AL1 | ENSG00000146426 | TIAM2 |
| ENSG00000231500 | RPS18 | ENSG00000198925 | ATG9A |
| ENSG00000188076 | SCGB1C1 | ENSG00000168242 | HIST1H2BI |
| ENSG00000174442 | ZWILCH | ENSG00000254772 | EEF1G |
| ENSG00000242028 | HYPK | ENSG00000090971 | NAT14 |
| ENSG00000124217 | MOCS3 | ENSG00000144381 | HSPD1 |
| ENSG00000134186 | PRPF38B | ENSG00000127774 | EMC6 |
| ENSG00000105849 | TWISTNB | ENSG00000126259 | KIRREL2 |
| ENSG00000137337 | MDC1 | ENSG00000111364 | DDX55 |
| ENSG00000132207 | SLX1A | ENSG00000100749 | VRK1 |
| ENSG00000181625 | SLX1B | ENSG00000159063 | ALG8 |
| ENSG00000110717 | NDUFS8 | ENSG00000163795 | ZNF513 |
| ENSG00000132341 | RAN | ENSG00000068394 | GPKOW |
| ENSG00000014123 | UFL1 | ENSG00000112659 | CUL9 |
| ENSG00000101191 | DIDO1 | ENSG00000187257 | RSBN1L |
| ENSG00000125952 | MAX | ENSG00000172167 | MTBP |
| ENSG00000163714 | U2SURP | ENSG00000176177 | ENTHD1 |
| ENSG00000253710 | ALG11 | ENSG00000166783 | KIAA0430 |
| ENSG00000104356 | POP1 | ENSG00000165006 | UBAP1 |
| ENSG00000130826 | DKC1 | ENSG00000188958 | UTS2B |
| ENSG00000198780 | FAM169A | ENSG00000136247 | ZDHHC4 |
| ENSG00000116688 | MFN2 | ENSG00000196363 | WDR5 |
| ENSG00000166166 | TRMT61A | ENSG00000116661 | FBXO2 |
| ENSG00000214517 | PPME1 | ENSG00000113013 | HSPA9 |
| ENSG00000077235 | GTF3C1 | ENSG00000090061 | CCNK |
| ENSG00000152240 | HAUS1 | ENSG00000051596 | THOC3 |
| ENSG00000063177 | RPL18 | ENSG00000140534 | TICRR |
| ENSG00000087157 | PGS1 | ENSG00000100216 | TOMM22 |
| ENSG00000100567 | PSMA3 | ENSG00000104613 | INTS10 |
| ENSG00000169371 | SNUPN | ENSG00000183474 | GTF2H2C |
| ENSG00000197651 | CCER1 | ENSG00000159128 | IFNGR2 |
| ENSG00000198900 | TOP1 | ENSG00000243725 | TTC4 |
| ENSG00000213551 | DNAJC9 | ENSG00000102898 | NUTF2 |
| ENSG00000152464 | RPP38 | ENSG00000170515 | PA2G4 |
| ENSG00000131467 | PSME3 | ENSG00000117036 | ETV3 |
| ENSG00000223510 | CDRT15 | ENSG00000196262 | PPIA |
| ENSG00000115053 | NCL | ENSG00000153037 | SRP19 |
| ENSG00000163041 | H3F3A | ENSG00000135801 | TAF5L |
| ENSG00000154813 | DPH3 | ENSG00000119414 | PPP6C |
| ENSG00000181873 | IBA57 | ENSG00000141013 | GAS8 |
| ENSG00000185591 | SP1 | ENSG00000113845 | TIMMDC1 |
| ENSG00000115355 | CCDC88A | ENSG00000175826 | CTDNEP1 |
| ENSG00000139350 | NEDD1 | ENSG00000117543 | DPH5 |
| ENSG00000108518 | PFN1 | ENSG00000204779 | FOXD4L5 |
| ENSG00000108264 | TADA2A | ENSG00000112249 | ASCC3 |
| ENSG00000134809 | TIMM10 | ENSG00000152256 | PDK1 |
| ENSG00000124383 | MPHOSPH10 | ENSG00000169217 | CD2BP2 |
| ENSG00000126067 | PSMB2 | ENSG00000166246 | C16orf71 |
| ENSG00000060688 | SNRNP40 | ENSG00000184164 | CRELD2 |
| ENSG00000042429 | MED17 | ENSG00000107960 | OBFC1 |
| ENSG00000196655 | TRAPPC4 | ENSG00000102384 | CENPI |
| ENSG00000107185 | RGP1 | ENSG00000079785 | DDX1 |
| ENSG00000124608 | AARS2 | ENSG00000133858 | ZFC3H1 |
| ENSG00000092098 | RNF31 | ENSG00000184110 | EIF3C |
| ENSG00000143569 | UBAP2L | ENSG00000146700 | SRCRB4D |
| ENSG00000233822 | HIST1H2BN | ENSG00000163380 | LMOD3 |
| ENSG00000171848 | RRM2 | ENSG00000116273 | PHF13 |
| ENSG00000183161 | FANCF | ENSG00000178229 | ZNF543 |
| ENSG00000166197 | NOLC1 | ENSG00000109475 | RPL34 |
| ENSG00000064703 | DDX20 | ENSG00000156469 | MTERFD1 |
| ENSG00000176102 | CSTF3 | ENSG00000155827 | RNF20 |
| ENSG00000106028 | SSBP1 | ENSG00000213741 | RPS29 |
| ENSG00000143315 | PIGM | ENSG00000165792 | METTL17 |
| ENSG00000136152 | COG3 | ENSG00000110844 | PRPF40B |
| ENSG00000134697 | GNL2 | ENSG00000100842 | EFS |
| ENSG00000159217 | IGF2BP1 | ENSG00000087495 | PHACTR3 |
| ENSG00000080608 | KIAA0020 | ENSG00000126261 | UBA2 |
| ENSG00000267368 | UPK3BL | ENSG00000136718 | IMP4 |
| ENSG00000130119 | GNL3L | ENSG00000091640 | SPAG7 |
| ENSG00000178950 | GAK | ENSG00000184886 | PIGW |
| ENSG00000205659 | LIN52 | ENSG00000184313 | MROH7 |
| ENSG00000123297 | TSFM | ENSG00000163481 | RNF25 |
| ENSG00000241370 | RPP21 | ENSG00000137054 | POLR1E |
| ENSG00000129351 | ILF3 | ENSG00000213085 | CCDC19 |
| ENSG00000174446 | SNAPC5 | ENSG00000171858 | RPS21 |
| ENSG00000132382 | MYBBP1A | ENSG00000130822 | PNCK |
| ENSG00000100664 | EIF5 | ENSG00000145216 | FIP1L1 |
| ENSG00000131469 | RPL27 | ENSG00000147130 | ZMYM3 |
| ENSG00000185128 | TBC1D3F | ENSG00000008086 | CDKL5 |
| ENSG00000111231 | GPN3 | ENSG00000165282 | PIGO |
| ENSG00000182774 | RPS17L | ENSG00000038358 | EDC4 |
| ENSG00000184779 | RPS17 | ENSG00000134684 | YARS |
| ENSG00000186871 | ERCC6L | ENSG00000153832 | FBXO36 |
| ENSG00000204568 | MRPS18B | ENSG00000140006 | WDR89 |
| ENSG00000108312 | UBTF | ENSG00000104643 | MTMR9 |
| ENSG00000167965 | MLST8 | ENSG00000151779 | NBAS |
| ENSG00000115241 | PPM1G | ENSG00000077348 | EXOSC5 |
| ENSG00000171103 | TRMT61B | ENSG00000131043 | AAR2 |
| ENSG00000116586 | LAMTOR2 | ENSG00000160193 | WDR4 |
| ENSG00000105793 | GTPBP10 | ENSG00000140691 | ARMC5 |
| ENSG00000100348 | TXN2 | ENSG00000141959 | PFKL |
| ENSG00000172757 | CFL1 | ENSG00000112053 | SLC26A8 |
| ENSG00000163634 | THOC7 | ENSG00000197111 | PCBP2 |
| ENSG00000008324 | SS18L2 | ENSG00000145191 | EIF2B5 |
| ENSG00000152404 | CWF19L2 | ENSG00000140988 | RPS2 |
| ENSG00000020129 | NCDN | ENSG00000181472 | ZBTB2 |

[0228] The gene symbols used in herein (including in Tables 3 and 4) are based on those found in the Human Gene Naming Committee (HGNC) which is searchable on the world-wide web at www.genenames.org. Ensembl IDs are provided for each gene symbol and are searchable world-wide web at www.ensembl.org.

[0229] The genes provided in Tables 3 and 4 are non-limiting examples of essential genes. Although additional essential genes will be apparent to the skilled artisan based on the knowledge in the art, the suitability of a particular gene for use according to the present disclosure can be determined, e.g., as discussed herein. For example, in some embodiments, a particular essential gene can be selected by analysis of potential off-target sites elsewhere in the genome. In some embodiments, only essential genes with one or more gRNA target sites that are unique in the human genome are selected for methods described herein. In some embodiments, only essential genes with one or more gRNA target sites that are found in only one other locus in the human genome are selected for methods described herein. In some embodiments, only essential genes with one or more gRNA target sites found in only two other loci in the human genome are selected for methods described herein.

### Gene Product of Interest

[0230] The methods, systems and cells of the present disclosure enable the integration of a gene of interest at an essential gene of a cell. The gene of interest can encode any gene product of interest. In certain embodiments, a gene product of interest comprises an antibody, an antigen, an enzyme, a growth factor, a receptor (e.g., cell surface, cytoplasmic, or nuclear), a hormone, a lymphokine, a cytokine, a chemokine, a reporter, a fusion protein comprising an immunogenic protein and an immunoglobulin domain, a chimeric antigen receptor (CAR), a functional fragment of any of the above, or a combination of any of the above.

[0231] In some embodiments, sequence for a gene product of interest can include, but is not limited to, prokaryotic sequences, cDNA from eukaryotic mRNA, genomic DNA sequences from eukaryotic (e.g., mammalian) DNA, and synthetic DNA sequences. For example, a gene of interest may encode an miRNA, an shRNA, a native polypeptide (i.e., a polypeptide found in nature) or fragment thereof; a variant polypeptide (i.e., a mutant of the native polypeptide having less than 100% sequence identity with the native polypeptide) or fragment thereof; an engineered polypeptide or peptide fragment, a therapeutic peptide or polypeptide, an imaging marker, a selectable marker, a degradation signal, and the like.

[0232] In some embodiments, a gene product of interest may be but is not limited to, e.g., a therapeutic protein or a gene product that confers a desired feature to the modified cell. In some embodiments, the transgene encodes a reporter protein, such as a fluorescent protein (e.g., as described herein) and an enzyme (e.g., luciferase and lacZ). In some embodiments, a reporter gene may aid the tracking of therapeutic cells once they are introduced to a subject.

[0233] In some embodiments, a gene product of interest may be a therapeutic polypeptide, e.g., an enzyme, an antibody or antigen binding fragment thereof, a receptor, a chimeric antigen receptor, or a cytokine.

[0234] In some embodiments, a therapeutic polypeptide is a protein lacking and/or deficient in a patient (e.g., a patient having and/or diagnosed with a genetic disease). In some embodiments, a polypeptide is fibrinogen, prothrombin, tissue factor, Factor V, Factor VII, Factor VIII, Factor IX, Factor X, Factor XI, Factor XII (Hageman factor), Factor XIII (fibrin-stabilizing factor), von Willebrand factor, prekallikrein, high molecular weight kininogen (Fitzgerald factor), fibronectin, antithrombin III, heparin cofactor II, protein C, protein S, protein Z, protein Z-related protease inhibitor, plasminogen, alpha 2-antiplasmin, tissue plasminogen activator, urokinase, plasminogen activator inhibitor-1, plasminogen activator inhibitor-2, angiotensin-converting enzyme 2 (Ace2), glucocerebrosidase (GBA), alpha-galactosidase A (GLA), arylsulfatase A, iduronate sulfatase (IDS), iduronidase (IDUA), acid sphingomyelinase (ASM), acid alpha-glucosidase (GAA), MMAA, MMAB, MMACHC, MMADHC (C2orf25), MTRR, LMBRD1, MTR, propionyl-CoA carboxylase (PCC) (PCCA and/or PCCB subunits), a glucose-6-phosphate transporter (G6PT) protein or glucose-6-phosphatase (G6Pase), an LDL receptor (LDLR), ApoB, LDLRAP-1, a PCSK9, a mitochondrial protein such as NAGS (N-acetylglutamate synthetase), CPS1 (carbamoyl phosphate synthetase I), and OTC (omithine transcarbamylase), ASS (argininosuccinic acid synthetase), ASL (argininosuccinase acid lyase) and/or ARGI (arginase), and/or a solute carrier family 25 (SLC25A13, an aspartate/glutamate carrier) protein, a UGTIAI or UDP glucuronsyltransferase polypeptide A1, a fumarylacetoacetate hydrolyase (FAH), an alanine-glyoxylate aminotransferase (AGXT) protein, a glyoxylate reductase/hydroxypyruvate reductase (GRHPR) protein, a transthyretin gene (TTR) protein, an ATP7B protein, a phenylalanine hydroxylase (PAH) protein, a lipoprotein lyase (LPL) protein, phenylalanine ammonia-lyase (PAL) protein, or glucagon-like peptide-1 (GLP-1), or a portion thereof.

[0235] In some embodiments, a gene product of interest is an antibody (e.g., a therapeutic antibody), or a portion thereof. Exemplary antibodies include, e.g., Rituximab, Palivizumab, Infliximab, Trastuzumab, Alemtuzumab, Adalimumab, Ibritumomab tiuxetan, Omalizumab, Cetuximab, Bevacizumab, Natalizumab, Panitumumab, Ranibizumab, Certolizumab pegol, Ustekinumab, Canakinumab, Golimumab, Ofatumumab, Tocilizumab, Denosumab, Belimumab, Ipilimumab, Brentuximab vedotin, Pertuzumab, Trastuzumab emtansine, Obinutuzumab, Siltuximab, Ramucirumab, Vedolizumab, Blinatumomab, Nivolumab, Pembrolizumab, Idarucizumab, Necitumumab, Dinutuximab, Secukinumab, Mepolizumab, Alirocumab, Evolocumab, Daratumumab, Elotuzumab, Ixekizumab, Reslizumab, Olaratumab, Bezlotoxumab, Atezolizumab, Obiltoxaximab, Inotuzumab ozogamicin, Brodalumab, Guselkumab, Dupilumab, Sarilumab, Avelumab, Ocrelizumab, Emicizumab, Benralizumab, Gemtuzumab ozogamicin, Durvalumab, Burosumab, Lanadelumab, Mogamulizumab, Erenumab, Galcanezumab, Tildrakizumab, Cemiplimab, Emapalumab, Fremanezumab, Ibalizumab, Moxetumomab pasudodox, Ravulizumab, Romosozumab, Risankizumab, Polatuzumab vedotin, Brolucizumab, or any combination thereof (see e.g., Lu et al., Development of therapeutic antibodies for the treatment of diseases. Journal of Biomedical Science, 2020). Additional gene products of interest include antibodies (or portions thereof) that bind to CD138, CD38, CD33, CD123, CD72, CD79a, CD79b, mesothelin, PD-1, PD-L1, PSMA, BCMA, ROR1, MUC-16, LlCAM, CD22, CD19, CD20, CD23, CD24, CD37, CD30, CA125, CD56, c-Met, EGFR, GD-3, HPV E6, HPV E7, MUC-1, HER2, folate receptor a, CD97, CD171, CD179a, CD44v6, WT1, VEGF-A, VEGFR1, VEGFR2, IL13RA1, IL13RA2, IL11RA, PSA, FcRH5, NKG2D ligand, NY-ESO-1, TAG-72, CEA, ephrin A2, ephrin B2, Lewis A antigen, Lewis Y antigen, MAGE, MAGE-A1, RAGE-1, folate receptor beta, EGFRvlII, LGR5, SSX2, AKAP-4, FLT3, fucosyl GM1, GM3, o-acetyl-GD2, or GD2.

[0236] In some embodiments, a gene product of interest may be a protein involved in immune regulation, or an immunomodulatory protein. In some embodiments, for example, such proteins are, PD-L1, CTLA-4, M-CSF, IL-4, IL-6, IL-10, IL-11, IL-13, TGF-β1, and various isoforms thereof. By way of example, in some embodiments, a gene product of interest may be an isoform of HLA-G (e.g., HLA-G1, -G2, -G3, -G4, -G5, -G6, or -G7) or HLA-E; allogeneic cells expressing such a nonclassical MHC class I molecule may be less immunogenic and better tolerated when transplanted into a human patient who is not the source of the cells, making “universal” cell therapy possible.

[0237] In some embodiments, a gene product of interest may be a protein involved in promotion of B cell survival, proliferation, and/or differentiation. In some embodiments, for example, such proteins are BAFF, CD40L, IL-4, and various isoforms thereof.

[0238] In some embodiments, a gene product of interest may be a cytokine. In some embodiments, expression of a cytokine from a modified cell generated using a method as described herein allows for localized dosing of the cytokine in vivo (e.g., within a subject in need thereof) and/or avoids a need to systemically administer a high-dose of the cytokine to a subject in need thereof (e.g., a lower dose of the cytokine may be administered). In some embodiments, the risk of dose-limiting toxicities associated with administering a cytokine is reduced while cytokine mediated cell functions are maintained. In some embodiments, to facilitate cell function without the need to additionally administer high-doses of soluble cytokines, a partial or full peptide of one or more of IL2, IL4, IL6, IL7, IL9, IL10, IL11, IL12, IL15, IL18, IL21, IFN-α, IFN-β and/or their respective receptor is introduced to the cell to enable cytokine signaling with or without the expression of the cytokine itself, thereby maintaining or improving cell growth, proliferation, expansion, and/or effector function with reduced risk of cytokine toxicities. In some embodiments, the introduced cytokine and/or its respective native or modified receptor for cytokine signaling are expressed on the cell surface. In some embodiments, the cytokine signaling is constitutively activated. In some embodiments, the activation of the cytokine signaling is inducible. In some embodiments, the activation of the cytokine signaling is transient and/or temporal. In some embodiments, a gene product if interest can be IL2, IL3, IL4, IL6, IL7, IL9, IL10, IL11, IL12, IL13, IL15, IL21, GM-CSF, IFN-α, IFN-b, IFN-g, erythropoietin, and/or the respective cytokine receptor. In some embodiments, a gene product of interest can be CCL3, TNFα, CCL23, IL2RB, IL12RB2, or IRF7.

[0239] In some embodiments, a gene product of interest can be a chemokine and/or the respective chemokine receptor. In some embodiments, a chemokine receptor can be, but is not limited to, CCR2, CCR5, CCR8, CX3C1, CX3CR1, CXCR1, CXCR2, CXCR3A, CXCR3B, or CXCR2. In some embodiments, a chemokine can be, but is not limited to, CCL7, CCL19, or CXL14.

[0240] In some embodiments, a gene product of interest is a CAR, such as but not limited to a CAR targeting mesothelin, EGFR, HER2 and/or MICA/B. CARs are well-known to those of ordinary skill in the art and include those described in, for example: WO13/063419 (mesothelin), WO15/164594 (EGFR), WO13/063419 (HER2), WO16/154585 (MICA and MICB), the entire contents of each of which are expressly incorporated herein by reference in their entireties. Exemplary CARs (or binders that target to a cell), include, but are not limited to, bi-specific antigen binding CARs, switchable CARs, dimerizable CARs, split CARs, multi-chain CARs, inducible CARs, CARs and binders that bind BCMA, androgen receptor, PSMA, PSCA, Mucd, HPV viral peptides (i.e., E7), EBV viral peptides, WT1, CEA, EGFR, EGFRvIII, IL13Rα2, GD2, CA125, EpCAM, Muc16, carbonic anhydrase IX (CAIX), CCR1, CCR4, carcinoembryonic antigen (CEA), CD3, CD5, CD7, CD10, CD19, CD20, CD22, CD23, CD24, CD26, CD30, CD33, CD34, CD35, CD38 CD41, CD44, CD44V6, CD49f, CD56, CD70, CD92, CD99, CD123, CD133, CD135, CD148, CD150, CD261, CD362, CLEC12A, MDM2, CYP1B, livin, cyclin 1, NKp30, NKp46, DNAM1, NKp44, CA9, PD1, PDL1, an antigen of cytomegalovirus (CMV), epithelial glycoprotein-40 (EGP-40), GPRC5D, receptor tyrosine kinases erb-B2,3,4, EGFIR, ERBB folate binding protein (FBP), fetal acetylcholine receptor (AChR), folate receptor-a, ganglioside G3 (GD3) human Epidermal Growth Factor Receptor 2 (HER-2), human telomerase reverse transcriptase (hTERT), ICAM-1, Integrin B7, Interleukin-13 receptor subunit alpha-2 (IL-13Ra2), K-light chain, kinase insert domain receptor (KDR), Lewis A (CA19.9), Lewis Y (Le Y), L1 cell adhesion molecule (LI-CAM), LILRB2, melanoma antigen family A 1 (MAGE-A1), MICA/B, Mucin 16 (Muc-16), NKCSI, NKG2D ligands, c-Met, cancer-testis antigen NYES0-1, oncofetal antigen (h5T4), PRAME, prostate stem cell antigen (PSCA), PRAME prostate-specific membrane antigen (PSMA), tumor-associated glycoprotein 72 (TAG-72), TIM-3, TRBCI, TRBC2, vascular endothelial growth factor R2 (VEGF-R2), Wilms tumor protein (WT-1), a pathogen antigen, or any suitable combination thereof. Additional suitable CARs and binders include those described in FIG. 3 of Davies and Maher, Adoptive T-cell Immunotherapy of Cancer Using Chimeric Antigen Receptor-Grafted T Cells, Archivum Immunologiae et Therapiae Experimentalis 58(3):165-78 (2010), the entire contents of which are incorporated herein by reference. Additional CARs suitable for methods described herein include: CD171-specific CARs (Park et al., Mol Ther (2007) 15(4):825-833), EGFRvIII-specific CARs (Morgan et al, Hum Gene Ther (2012) 23(10): 1043-1053), EGF-R-specific CARs (Kobold et al, J Natl Cancer Inst (2014)107(1):364), carbonic anhydrase K-specific CARs (Lamers et al., Biochem Soc Trans (2016) 44(3):951-959), FR-a-specific CARs (Kershaw et al., Clin Cancer Res (2006) 12(20):6106-6015), HER2-specific CARs (Ahmed et al., J Clin Oncol (2015) 33(15)1688-1696; Nakazawa et al., Mol Ther (2011) 19(12):2133-2143; Ahmed et al., Mol Ther (2009) 17(10): 1779-1787; Luo et al., Cell Res (2016) 26(7):850-853; Morgan et al., Mol Ther (2010) 18(4):843-85 1; Grada et al., Mol Ther Nucleic Acids (2013) 9(2):32), CEA-specific CARs (Katz et al., Clin Cancer Res (2015) 21 (14):3149-3159), IL13Ra2-specific CARs (Brown et al., Clin Cancer Res (2015) 21(18):4062-4072), GD2-specific CARs (Louis et al., Blood (2011) 118(23):6050-6056; Caruana et al., Nat Med (2015) 21(5):524-529), ErbB2-specific CARs (Wilkie et al., J Clin Immunol (2012) 32(5): 1059-1070), VEGF-R-specific CARs (Chinnasamy et al., Cancer Res (2016) 22(2):436-447), FAP-specific CARs (Wang et al., Cancer Immunol Res (2014) 2(2): 154-166), MSLN-specific CARs (Moon et al., Clin Cancer Res (2011) 17(14):4719-30), CD19-specific CARs (Axicabtagene ciloleucel (Yescarta®) and Tisagenlecleucel (Kymriah®). See also, Li et al., J Hematol and Oncol (2018) 11(22), reviewing clinical trials of tumor-specific CARs.

[0241] In some embodiments, the gene product of interest comprises a protein or polypeptide whose expression within a cell, e.g., a cell modified as described herein, enables the cell to inhibit or evade immune rejection after transplant or engraftment into a subject. In some embodiments, the gene product of interest is HLA-E, HLA-G, CTL4, CD47, or an associated ligand.

[0242] In some embodiments, a gene product of interest comprises a chimeric switch receptor (see e.g., WO2018094244A1—TGFBeta Signal Converter; Ankri et al., Human T cells Engineered to express a programmed death 1/28 costimulatory retargeting molecule display enhanced antitumor activity, The Journal of Immunology, Oct. 15, 2013, 191; Roth et al., Pooled knockin targeting for genome engineering of cellular immunotherapies, Cell. 2020 Apr. 30; 181(3):728-744.e21; and Boyerinas et al., A Novel TGF-β2/Interleukin Receptor Signal Conversion Platform That Protects CAR/TCR T Cells from TGF-β2-Mediated Immune Suppression and Induces T Cell Supportive Signaling Networks, Blood, 2017). In some embodiments, chimeric switch receptors are engineered cell-surface receptors comprising an extracellular domain from an endogenous cell-surface receptor and a heterologous intracellular signaling domain, such that ligand recognition by the extracellular domain results in activation of a different signaling cascade than that activated by the wild type form of the cell-surface receptor. In some embodiments, a chimeric switch receptor comprises an extracellular domain of an inhibitory cell-surface receptor fused to an intracellular domain that leads to the transmission of an activating signal rather than the inhibitory signal normally transduced by the inhibitory cell-surface receptor. In some embodiments, extracellular domains derived from cell-surface receptors known to inhibit immune effector cell activation can be fused to activating intracellular domains. In such an embodiment, engagement of the corresponding ligand may then activate signaling cascades that increase, rather than inhibit, the activation of the immune effector cell. For example, in some embodiments, a gene product of interest is a PD1-CD28 switch receptor, wherein the extracellular domain of PD1 is fused to the intracellular signaling domain of CD28 (See e.g., Liu et al., Cancer Res 76:6 (2016), 1578-1590 and Moon et al., Molecular Therapy 22 (2014), S201). In some embodiments, encoding gene product of interest is or comprises the extracellular domain of CD200R and the intracellular signaling domain of CD28 (See Oda et al., Blood 130:22 (2017), 2410-2419).

[0243] In some embodiments, a gene product of interest is a reporter gene (e.g., GFP, mCherry, etc.). In some embodiments, a reporter gene is utilized to confirm the suitability of a knock-in cassette's expression capacity. In certain embodiments, a gene product of interest may be a colored or fluorescent protein such as: blue/UV proteins, e.g. TagBFP, mTagBFP2, Azurite, EBFP2, mKalamal, Sirius, Sapphire, T-Sapphire; cyan proteins, e.g. ECFP, Cerulean, SCFP3A, mTurquoise, mTurquoise2, monomeric Midoriishi-Cyan, TagCFP, mTFPI; green proteins, e.g. EGFP, Emerald, Superfolder GFP, Monomeric Azami Green, TagGFP2, mUKG, m Wasabi, Clover, mNeonGreen; yellow proteins, e.g. EYFP, Citrine, Venus, SYFP2, TagYFP; orange proteins, e.g. Monomeric Kusabira-Orange, mKOK, mKO2, mOrange, mOrange2; red proteins, e.g. mRaspberry, mStrawberry, mTangerine, tdTomato, TagRFP, TagRFP-T, mApple, mRuby, mRuby2; far-red proteins, e.g. mPlum, HcRed-Tandem, mKate2, mNeptune, NirFP; near-IR proteins, e.g. TagRFP657, IFP1.4, iRFP; long stokes shift proteins, e.g. mKeima Red, LSS-mKate1, LSS-mKate2, mBeRFP; photoactivatible proteins, e.g. PA-GFP, PAmCherryl, PATagRFP; photoconvertible proteins, e.g. Kaede (green), Kaede (red), KikGR1 (green), KikGR1 (red), PS-CFP2, PS-CFP2, mEos2 (green), mEos2 (red), mEos3.2 (green), mEos3.2 (red), PSmOrange, PSmOrange, photoswitchable proteins, e.g. Dronpa, and combinations thereof.

[0244] In some embodiments, a gene of interest provided herein can optionally include a sequence encoding a destabilizing domain (“a destabilizing sequence”) for temporal and/or spatial control of protein expression. Non-limiting examples of destabilizing sequences include sequences encoding a FK506 sequence, a dihydrofolate reductase (DHFR) sequence, or other exemplary destabilizing sequences.

[0245] In the absence of a stabilizing ligand, a protein sequence operatively linked to a destabilizing sequence is degraded by ubiquitination. In contrast, in the presence of a stabilizing ligand, protein degradation is inhibited, thereby allowing the protein sequence operatively linked to the destabilizing sequence to be actively expressed. As a positive control for stabilization of protein expression, protein expression can be detected by conventional means, including enzymatic, radiographic, colorimetric, fluorescence, or other spectrographic assays; fluorescent activating cell sorting (FACS) assays; immunological assays (e.g., enzyme linked immunosorbent assay (ELISA), radioimmunoassay (RIA), and immunohistochemistry).

[0246] Additional examples of destabilizing sequences are known in the art. In some embodiments, the destabilizing sequence is a FK506- and rapamycin-binding protein (FKBP12) sequence, and the stabilizing ligand is Shield-1 (Shld1) (Banaszynski et al. (2012) Cell 126(5): 995-1004, which is incorporated in its entirety herein by reference). In some embodiments, a destabilizing sequence is a DHFR sequence, and a stabilizing ligand is trimethoprim (TMP) (Iwamoto et al. (2010) Chem Biol 17:981-988, which is incorporated in its entirety herein by reference). In some embodiments, a destabilizing domain is small molecule-assisted shutoff (SMASh), where a constitutive degron with a protease and its corresponding cleavage site derived from hepatitis C virus are combined. In some embodiments, a destabilizing domain comprises a HaloTag system, dTag system, and/or nanobody (see e.g., Luh et al., Prey for the proteasome: targeted protein degradation—a medicinal chemist's perspective; Angewandte Chemie, 2020). In some embodiments, a destabilizing sequence can be used to temporally control a cell modified as described herein.

[0247] In some embodiments, a coding sequence for a single gene product of interest may be included in a knock-in cassette. In some embodiments, coding sequences for two gene products of interest may be included in a single knock-in cassette; in some embodiments, this may be referred to as a bicistronic or multicistronic construct. In some embodiments, coding sequences for more than two gene products of interest may be included in a single knock-in cassette; in some embodiments, this may be referred to as a multicistronic construct. In some embodiments, when more than one coding sequence for more than one gene product of interest is included in a knock-in cassette, these sequences may have a linker sequence connecting them. Linker sequences are generally known in the art, such as a nucleotide sequence encoding the amino acid sequence SGGGSGGGGSGGGGSGGGGSGGGSLQ. In some embodiments, where more than one coding sequence for more than one gene product of interest is included in a knock-in cassette, these sequences may be connected by a linker sequence, an IRES, and/or 2A element.

### AAV Capsids

[0248] In some embodiments, the present disclosure provides one or more polynucleotide constructs (e.g., donor templates) packaged into an AAV capsid. In some embodiments, an AAV capsid is from or derived from an AAV capsid of an AAV2, 3, 4, 5, 6, 7, 8, 9, or 10 serotype, or one or more hybrids thereof. In some embodiments, an AAV capsid is from an AAV ancestral serotype. In some embodiments, an AAV capsid is an ancestral (Anc) AAV capsid. An Anc capsid is created from a construct sequence that is constructed using evolutionary probabilities and evolutionary modeling to determine a probable ancestral sequence. In some embodiments, an AAV capsid has been modified in a manner known in the art (see e.g., Büning and Srivastava, Capsid modifications for targeting and improving the efficacy of AAV vectors, Mol Ther Methods Clin Dev. 2019)

[0249] In some embodiments, as provided herein, any combination of AAV capsids and AAV constructs (e.g., comprising AAV ITRs) may be used in recombinant AAV (rAAV) particles of the present disclosure. In some embodiments, an AAV ITR is from or derived from an AAV ITR of AAV2, 3, 4, 5, 6, 7, 8, 9, or 10. For example, wild-type or variant AA6 ITRs and AAV6 capsid, wild-type or variant AAV2 ITRs and AAV6 capsid, etc. In some embodiments of the present disclosure, an AAV particle is wholly comprised of AAV6 components (e.g., capsid and ITRs are AAV6 serotype). In some embodiments, an AAV particle is an AAV6/2, AAV6/8 or AAV6/9 particle (e.g., an AAV2, AAV8 or AAV9 capsid with an AAV construct having AAV6 ITRs).

### Nuclease

[0250] Any nuclease that causes a break within an endogenous coding sequence of an essential gene of the cell can be used in the methods of the present disclosure. In some embodiments the nuclease is a DNA nuclease. In some embodiments the nuclease causes a single-strand break (SSB) within an endogenous coding sequence of an essential gene of the cell, e.g., in a “prime editing” system. In some embodiments the nuclease causes a double-strand break (DSB) within an endogenous coding sequence of an essential gene of the cell. In some embodiments the double-strand break is caused by a single nuclease. In some embodiments the double-strand break is caused by two nucleases that each cause a single-strand break on opposing strands, e.g., a dual “nickase” system. In some embodiments the nuclease is a CRISPR/Cas nuclease and the method further comprises contacting the cell with one or more guide molecules for the CRISPR/Cas nuclease. Exemplary CRISPR/Cas nucleases and guide molecules are described in more detail herein. It is to be understood that the nuclease (including a nickase) is not limited in any manner and can also be a zinc finger nuclease (ZFN), a transcription activator-like effector nuclease (TALEN), a meganuclease, or other nuclease known in the art (or a combination thereof). Methods for designing zinc finger nucleases (ZFNs) are well known in the art, e.g., see Urnov et al., Nature Reviews Genetics 2010; 11:636-640 and Paschon et al., Nat. Commun. 2019; 10(1):1133 and references cited therein. Methods for designing transcription activator-like effector nucleases (TALENs) are well known in the art, e.g., see Joung and Sander, Nat. Rev. Mol. Cell Biol. 2013; 14(1):49-55 and references cited therein. Methods for designing meganucleases are also well known in the art, e.g., see Silva et al., Curr. Gene Ther. 2011; 11(1):11-27 and Redel and Prather, Toxicol. Pathol. 2016; 44(3):428-433.

[0251] In some embodiments, a nuclease suitable for methods described herein can have an editing efficiency that is greater than about 50%. In some embodiments, a nuclease suitable for methods described herein can have an editing efficiency that is greater than about 55%. In some embodiments, a nuclease suitable for methods described herein can have an editing efficiency that is greater than about 60%. In some embodiments, a nuclease suitable for methods described herein can have an editing efficiency that is greater than about 65%. In some embodiments, a nuclease suitable for methods described herein can have an editing efficiency that is greater than about 70%. In some embodiments, a nuclease suitable for methods described herein can have an editing efficiency that is greater than about 75%. In some embodiments, a nuclease suitable for methods described herein can have an editing efficiency that is greater than about 80%. In some embodiments, a nuclease suitable for methods described herein can have an editing efficiency that is greater than about 85%. In some embodiments, a nuclease suitable for methods described herein can have an editing efficiency that is greater than about 90%. In some embodiments, a nuclease suitable for methods described herein can have an editing efficiency that is greater than about 95%. In some embodiments, a nuclease suitable for methods described herein can have an editing efficiency that is greater than about 96%. In some embodiments, a nuclease suitable for methods described herein can have an editing efficiency that is greater than about 97%. In some embodiments, a nuclease suitable for methods described herein can have an editing efficiency that is greater than about 98%. In some embodiments, a nuclease suitable for methods described herein can have an editing efficiency that is greater than about 99%.

[0252] In general, the nuclease can be delivered to the cell as a protein or a nucleic acid encoding the protein, e.g., a DNA molecule or mRNA molecule. The protein or nucleic acid can be combined with other delivery agents, e.g., lipids or polymers in a lipid or polymer nanoparticle and targeting agents such as antibodies or other binding agents with specificity for the cell. The DNA molecule can be a nucleic acid vector, such as a viral genome or circular double-stranded DNA, e.g., a plasmid. Nucleic acid vectors encoding a nuclease can include other coding or non-coding elements. For example, a nuclease can be delivered as part of a viral genome (e.g., in an AAV, adenoviral or lentiviral genome) that includes certain genomic backbone elements (e.g., inverted terminal repeats, in the case of an AAV genome).

[0253] A CRISPR/Cas nuclease can be delivered to the cell as a protein or a nucleic acid encoding the protein, e.g., a DNA molecule or mRNA molecule. The guide molecule can be delivered as an RNA molecule or encoded by a DNA molecule. A CRISPR/Cas nuclease can also be delivered with a guide molecule as a ribonucleoprotein (RNP) and introduced into the cell via nucleofection (electroporation).

### CRISPR/Cas Nucleases

[0254] CRISPR/Cas nucleases according to the present disclosure include, but are not limited to, naturally-occurring Class 2 CRISPR nucleases such as Cas9, and Cpf1 (Cas12a), as well as other Cas12 nucleases and nucleases derived or obtained therefrom. In functional terms, CRISPR/Cas nucleases are defined as those nucleases that: (a) interact with (e.g., complex with) a gRNA; and (b) together with the gRNA, associate with, and optionally cleave or modify, a target region of a DNA that includes (i) a sequence complementary to the targeting domain of the gRNA and, optionally, (ii) an additional sequence referred to as a “protospacer adjacent motif,” or “PAM,” which is described in greater detail below. As the following examples will illustrate, CRISPR/Cas nucleases can be defined, in broad terms, by their PAM specificity and cleavage activity, even though variations may exist between individual CRISPR/Cas nucleases that share the same PAM specificity or cleavage activity. Skilled artisans will appreciate that some aspects of the present disclosure relate to systems and methods that can be implemented using any suitable CRISPR/Cas nuclease having a certain PAM specificity and/or cleavage activity. For this reason, unless otherwise specified, the term CRISPR/Cas nuclease should be understood as a generic term, and not limited to any particular type (e.g., Cas9 vs. Cpf1), species (e.g., S. pyogenes vs. S. aureus) or variation (e.g., full-length vs. truncated or split; naturally-occurring PAM specificity vs. engineered PAM specificity, etc.) of CRISPR/Cas nuclease.

[0255] The PAM sequence takes its name from its sequential relationship to the “protospacer” sequence that is complementary to gRNA targeting domains (or “spacers”). Together with protospacer sequences, PAM sequences define target regions or sequences for specific CRISPR/Cas nuclease and gRNA combinations.

[0256] Various CRISPR/Cas nucleases may require different sequential relationships between PAMs and protospacers. In general, Cas9s recognize PAM sequences that are 3′ of the protospacer. Cpf1 (Cas12a), on the other hand, generally recognizes PAM sequences that are 5′ of the protospacer.

[0257] In addition to recognizing specific sequential orientations of PAMs and protospacers, CRISPR/Cas nucleases can also recognize specific PAM sequences. S. aureus Cas9, for instance, recognizes a PAM sequence of NNGRRT or NNGRRV, wherein the N residues are immediately 3′ of the region recognized by the gRNA targeting domain. S. pyogenes Cas9 recognizes NGG PAM sequences. F. novicida Cpf1 recognizes a TTN PAM sequence. PAM sequences have been identified for a variety of CRISPR/Cas nucleases, and a strategy for identifying novel PAM sequences has been described by Shmakov et al., Molecular Cell 2015; 60:385-397. It should also be noted that engineered CRISPR/Cas nucleases can have PAM specificities that differ from the PAM specificities of reference molecules (for instance, in the case of an engineered CRISPR/Cas nuclease, the reference molecule may be the naturally occurring variant from which the CRISPR/Cas nuclease is derived, or the naturally occurring variant having the greatest amino acid sequence homology to the engineered CRISPR/Cas nuclease).

[0258] In addition to their PAM specificity, CRISPR/Cas nucleases can be characterized by their DNA cleavage activity: naturally-occurring CRISPR/Cas nucleases typically form double-strand breaks (DSBs) in target nucleic acids, but engineered variants called “nickases” have been produced that generate only single-strand breaks (SSBs), e.g., those discussed in Ran et al., Cell 2013; 154(6):1380-1389 (“Ran”), or that that do not cut at all.

### Cas9

[0259] Crystal structures have been determined for S. pyogenes Cas9 (Jinek et al., Science 2014; 343(6176):1247997 (“Jinek 2014”), and for S. aureus Cas9 in complex with a unimolecular guide RNA and a target DNA. See Nishimasu et al., Cell 1024; 156:935-949 (“Nishimasu 2014”); Nishimasu et al., Cell 2015; 162:1113-1126 (“Nishimasu 2015”); and Anders et al., Nature 2014; 513(7519):569-73 (“Anders 2014”).

[0260] A naturally occurring Cas9 protein comprises two lobes: a recognition (REC) lobe and a nuclease (NUC) lobe; each of which comprise particular structural and/or functional domains. The REC lobe comprises an arginine-rich bridge helix (BH) domain, and at least one REC domain (e.g., a REC1 domain and, optionally, a REC2 domain). The REC lobe does not share structural similarity with other known proteins, indicating that it is a unique functional domain. While not wishing to be bound by any theory, mutational analyses suggest specific functional roles for the BH and REC domains: the BH domain appears to play a role in gRNA:DNA recognition, while the REC domain is thought to interact with the repeat:anti-repeat duplex of the gRNA and to mediate the formation of the Cas9/gRNA complex.

[0261] The NUC lobe comprises a RuvC domain, an HNH domain, and a PAM-interacting (PI) domain. The RuvC domain shares structural similarity to retroviral integrase superfamily members and cleaves the non-complementary (i.e., bottom) strand of the target nucleic acid. It may be formed from two or more split RuvC motifs (such as RuvC I, RuvCII, and RuvCIII in S. pyogenes and S. aureus). The HNH domain, meanwhile, is structurally similar to HNN endonuclease motifs, and cleaves the complementary (i.e., top) strand of the target nucleic acid. The PI domain, as its name suggests, contributes to PAM specificity.

[0262] While certain functions of Cas9 are linked to (but not necessarily fully determined by) the specific domains set forth above, these and other functions may be mediated or influenced by other Cas9 domains, or by multiple domains on either lobe. For instance, in S. pyogenes Cas9, as described in Nishimasu 2014, the repeat:antirepeat duplex of the gRNA falls into a groove between the REC and NUC lobes, and nucleotides in the duplex interact with amino acids in the BH, PI, and REC domains. Some nucleotides in the first stem loop structure also interact with amino acids in multiple domains (PI, BH and REC1), as do some nucleotides in the second and third stem loops (RuvC and PI domains).

### Cpf1

[0263] The crystal structure of Acidaminococcus sp. Cpf1 in complex with crRNA and a dsDNA target including a TTTN PAM sequence has been solved by Yamano et al., Cell. 2016; 165(4):949-962 (“Yamano”). Cpf1, like Cas9, has two lobes: a REC (recognition) lobe, and a NUC (nuclease) lobe. The REC lobe includes REC1 and REC2 domains, which lack similarity to any known protein structures. The NUC lobe, meanwhile, includes three RuvC domains (RuvC-I, -II and -III) and a BH domain. However, in contrast to Cas9, the Cpf1 REC lobe lacks an HNH domain, and includes other domains that also lack similarity to known protein structures: a structurally unique PI domain, three Wedge (WED) domains (WED-I, -II and -III), and a nuclease (Nuc) domain.

[0264] While Cas9 and Cpf1 share similarities in structure and function, it should be appreciated that certain Cpf1 activities are mediated by structural domains that are not analogous to any Cas9 domains. For instance, cleavage of the complementary strand of the target DNA appears to be mediated by the Nuc domain, which differs sequentially and spatially from the HNH domain of Cas9. Additionally, the non-targeting portion of Cpf1 gRNA (the handle) adopts a pseudoknot structure, rather than a stem loop structure formed by the repeat:antirepeat duplex in Cas9 gRNAs.

### Nuclease Variants

[0265] The CRISPR/Cas nucleases described herein have activities and properties that can be useful in a variety of applications, but the skilled artisan will appreciate that CRISPR/Cas nucleases can also be modified in certain instances, to alter cleavage activity, PAM specificity, or other structural or functional features.

[0266] Turning first to modifications that alter cleavage activity, mutations that reduce or eliminate the activity of domains within the NUC lobe have been described above. Exemplary mutations that may be made in the RuvC domains, in the Cas9 HNH domain, or in the Cpf1 Nuc domain are described in Ran, Yamano and PCT Publication No. WO 2016/073990A1, the entire contents of each of which are incorporated herein by reference. In general, mutations that reduce or eliminate activity in one of the two nuclease domains result in CRISPR/Cas nucleases with nickase activity, but it should be noted that the type of nickase activity varies depending on which domain is inactivated. As one example, inactivation of a RuvC domain or of a Cas9 HNH domain results in a nickase. Exemplary nickase variants include Cas9 D10A and Cas9 1840A (numbering scheme according to SpCas9 wild-type sequence). Additional suitable nickase variants, including Cas12a variants, will be apparent to the skilled artisan based on the present disclosure and the knowledge in the art. The present disclosure is not limited in this respect. In some embodiments a nickase may be fused to a reverse transcriptase to produce a prime editor (PE), e.g., as described in Anzalone et al., Nature 2019; 576:149-157, the entire contents of which are incorporated herein by reference.

[0267] Modifications of PAM specificity relative to naturally occurring Cas9 reference molecules has been described for both S. pyogenes (Kleinstiver et al., Nature 2015; 523(7561):481-5); and S. aureus (Kleinstiver et al., Nat Biotechnol. 2015; 33(12):1293-1298). Modifications that improve the targeting fidelity of Cas9 have also been described (Kleinstiver et al., Nature 2016; 529:490-495). Each of these references is incorporated by reference herein.

[0268] CRISPR/Cas nucleases have also been split into two or more parts, as described by Zetsche et al., Nat Biotechnol. 2015; 33(2):139-42, incorporated by reference, and by Fine et al., Sci Rep. 2015; 5:10777, incorporated by reference.

[0269] CRISPR/Cas nucleases can be, in certain embodiments, size-optimized or truncated, for instance via one or more deletions that reduce the size of the nuclease while still retaining gRNA association, target and PAM recognition, and cleavage activities. In certain embodiments, RNA guided nucleases are bound, covalently or non-covalently, to another polypeptide, nucleotide, or other structure, optionally by means of a linker. Exemplary bound nucleases and linkers are described by Guilinger et al., Nature Biotech. 2014; 32:577-582, which is incorporated by reference herein.

[0270] CRISPR/Cas nucleases also optionally include a tag, such as, but not limited to, a nuclear localization signal, to facilitate movement of CRISPR/Cas nuclease protein into the nucleus. In certain embodiments, the CRISPR/Cas nuclease can incorporate C- and/or N-terminal nuclear localization signals. Nuclear localization sequences are known in the art.

[0271] The foregoing list of modifications is intended to be exemplary in nature, and the skilled artisan will appreciate, in view of the instant disclosure, that other modifications may be possible or desirable in certain applications. For brevity, therefore, exemplary systems, methods and compositions of the present disclosure are presented with reference to particular CRISPR/Cas nucleases, but it should be understood that the CRISPR/Cas nucleases used may be modified in ways that do not alter their operating principles. Such modifications are within the scope of the present disclosure.

[0272] Exemplary suitable nuclease variants include, but are not limited to, AsCpf1 (AsCas12a) variants comprising an M537R substitution, an H800A substitution, and/or an F870L substitution, or any combination thereof (numbering scheme according to AsCpf1 wild-type sequence). In some embodiments, a nuclease variant is a Cas12a variant, e.g., a Cas12a variant comprising 1, 2, or 3 of the amino acid substitutions selected from M537R, F870L, and H800A. In some embodiments, a Cas12a variant comprises an amino acid sequence having at least about 90%, 95%, or 100% identity to an AsCpf1 sequence described herein.

[0273] Other suitable modifications of the AsCpf1 amino acid sequence are known to those of ordinary skill in the art. Some exemplary sequences of wild-type AsCpf1 and AsCpf1 variants are provided below:

His-AsCpf1-sNLS-sNLS H800A amino acid sequence
SEQ ID NO: 58
MGHHHHHHGSTQFEGFTNLYQVSKTLRFELIPQGKTLKHIQEQGF
IEEDKARNDHYKELKPIIDRIYKTYADQCLQLVQLDWENLSAAID
SYRKEKTEETRNALIEEQATYRNAIHDYFIGRTDNLTDAINKRHA
EIYKGLFKAELFNGKVLKQLGTVTTTEHENALLRSFDKFTTYFSG
FYENRKNVFSAEDISTAIPHRIVQDNFPKFKENCHIFTRLITAVP
SLREHFENVKKAIGIFVSTSIEEVFSFPFYNQLLTQTQIDLYNQL
LGGISREAGTEKIKGLNEVLNLAIQKNDETAHIIASLPHRFIPLF
KQILSDRNTLSFILEEFKSDEEVIQSFCKYKILLRNENVLETAEA
LFNELNSIDLTHIFISHKKLETISSALCDHWDTLRNALYERRISE
LTGKITKSAKEKVQRSLKHEDINLQEIISAAGKELSEAFKQKTSE
ILSHAHAALDQPLPTTLKKQEEKEILKSQLDSLLGLYHLLDWFAV
DESNEVDPEFSARLTGIKLEMEPSLSFYNKARNYATKKPYSVEKF
KLNFQMPTLASGWDVNKEKNNGAILFVKNGLYYLGIMPKQKGRYK
ALSFEPTEKTSEGFDKMYYDYFPDAAKMIPKCSTQLKAVTAHFQT
HTTPILLSNNFIEPLEITKEIYDLNNPEKEPKKFQTAYAKKTGDQ
KGYREALCKWIDFTRDFLSKYTKTTSIDLSSLRPSSQYKDLGEYY
AELNPLLYHISFQRIAEKEIMDAVETGKLYLFQIYNKDFAKGHHG
KPNLHTLYWTGLFSPENLAKTSIKLNGQAELFYRPKSRMKRMAAR
LGEKMLNKKLKDQKTPIPDTLYQELYDYVNHRLSHDLSDEARALL
PNVITKEVSHEIIKDRRFTSDKFFFHVPITLNYQAANSPSKFNQR
VNAYLKEHPETPIIGIDRGERNLIYITVIDSTGKILEQRSLNTIQ
QFDYQKKLDNREKERVAARQAWSVVGTIKDLKQGYLSQVIHEIVD
LMIHYQAVVVLENLNFGFKSKRTGIAEKAVYQQFEKMLIDKLNCL
VLKDYPAEKVGGVLNPYQLTDQFTSFAKMGTQSGFLFYVPAPYTS
KIDPLTGFVDPFVWKTIKNHESRKHFLEGFDFLHYDVKTGDFILH
FKMNRNLSFQRGLPGFMPAWDIVFEKNETQFDAKGTPFIAGKRIV
PVIENHRFTGRYRDLYPANELIALLEEKGIVERDGSNILPKLLEN
DDSHAIDTMVALIRSVLQMRNSNAATGEDYINSPVRDLNGVCFDS
RFQNPEWPMDADANGAYHIALKGQLLLNHLKESKDLKLQNGISNQ
DWLAYIQELRNGSPKKKRKVGSPKKKRKV
Cpf1 variant 1 amino acid sequence
SEQ ID NO: 59
MTQFEGFTNLYQVSKILRFELIPQGKTLKHIQEQGFIEEDKARND
HYKELKPIIDRIYKTYADQCLQLVQLDWENLSAAIDSYRKEKTEE
TRNALIEEQATYRNAIHDYFIGRTDNLTDAINKRHAEIYKGLFKA
ELFNGKVLKQLGTVTTTEHENALLRSFDKFTTYFSGFYENRKNVF
SAEDISTAIPHRIVQDNFPKFKENCHIFTRLITAVPSLREHFENV
KKAIGIFVSTSIEEVFSFPFYNQLLTQTQIDLYNQLLGGISREAG
TEKIKGLNEVLNLAIQKNDETAHIIASLPHRFIPLFKQILSDRNT
LSFILEEFKSDEEVIQSFCKYKTLLRNENVLETAEALFNELNSID
LTHIFISHKKLETISSALCDHWDTLRNALYERRISELTGKITKSA
KEKVQRSLKHEDINLQEIISAAGKELSEAFKQKTSEILSHAHAAL
DQPLPTTLKKQEEKEILKSQLDSLLGLYHLLDWFAVDESNEVDPE
FSARLTGIKLEMEPSLSFYNKARNYATKKPYSVEKFKLNFQRPTL
ASGWDVNKEKNNGAILFVKNGLYYLGIMPKQKGRYKALSFEPTEK
TSEGFDKMYYDYFPDAAKMIPKCSTQLKAVTAHFQTHTTPILLSN
NFIEPLEITKEIYDLNNPEKEPKKFQTAYAKKTGDQKGYREALCK
WIDFTRDFLSKYTKITSIDLSSLRPSSQYKDLGEYYAELNPLLYH
ISFQRIAEKEIMDAVETGKLYLFQIYNKDFAKGHHGKPNLHTLYW
TGLFSPENLAKTSIKLNGQAELFYRPKSRMKRMAHRLGEKMLNKK
LKDQKTPIPDTLYQELYDYVNHRLSHDLSDEARALLPNVITKEVS
HEIIKDRRFTSDKFLFHVPITLNYQAANSPSKFNQRVNAYLKEHP
ETPIIGIDRGERNLIYITVIDSTGKILEQRSLNTIQQFDYQKKLD
NREKERVAARQAWSVVGTIKDLKQGYLSQVIHEIVDLMIHYQAVV
VLENLNFGFKSKRTGIAEKAVYQQFEKMLIDKLNCLVLKDYPAEK
VGGVLNPYQLTDQFTSFAKMGTQSGFLFYVPAPYTSKIDPLIGFV
DPFVWKTIKNHESRKHFLEGFDFLHYDVKTGDFILHFKMNRNLSF
QRGLPGFMPAWDIVFEKNETQFDAKGTPFIAGKRIVPVIENHRFT
GRYRDLYPANELIALLEEKGIVERDGSNILPKLLENDDSHAIDTM
VALIRSVLQMRNSNAATGEDYINSPVRDLNGVCFDSRFQNPEWPM
DADANGAYHIALKGQLLLNHLKESKDLKLQNGISNQDWLAYIQEL
RNGRSSDDEATADSQHAAPPKKKRKVGGSGGSGGSGGSGGSGGSG
GSGGSLEHHHHHH
Cpf1 variant 2 amino acid sequence
SEQ ID NO: 60
MTQFEGFTNLYQVSKTLRFELIPQGKTLKHIQEQGFIEEDKARND
HYKELKPIIDRIYKTYADQCLQLVQLDWENLSAAIDSYRKEKTEE
TRNALIEEQATYRNAIHDYFIGRTDNLTDAINKRHAEIYKGLFKA
ELFNGKVLKQLGTVTTTEHENALLRSFDKFTTYFSGFYENRKNVF
SAEDISTAIPHRIVQDNFPKFKENCHIFTRLITAVPSLREHFENV
KKAIGIFVSTSIEEVFSFPFYNQLLTQTQIDLYNQLLGGISREAG
TEKIKGLNEVLNLAIQKNDETAHIIASLPHRFIPLFKQILSDRNT
LSFILEEFKSDEEVIQSFCKYKTLLRNENVLETAEALFNELNSID
LTHIFISHKKLETISSALCDHWDTLRNALYERRISELTGKITKSA
KEKVQRSLKHEDINLQEIISAAGKELSEAFKQKTSEILSHAHAAL
DQPLPTTLKKQEEKEILKSQLDSLLGLYHLLDWFAVDESNEVDPE
FSARLTGIKLEMEPSLSFYNKARNYATKKPYSVEKFKLNFQMPTL
ASGWDVNKEKNNGAILFVKNGLYYLGIMPKQKGRYKALSFEPTEK
TSEGFDKMYYDYFPDAAKMIPKCSTQLKAVTAHFQTHTTPILLSN
NFIEPLEITKEIYDLNNPEKEPKKFQTAYAKKTGDQKGYREALCK
WIDFTRDFLSKYTKITSIDLSSLRPSSQYKDLGEYYAELNPLLYH
ISFQRIAEKEIMDAVETGKLYLFQIYNKDFAKGHHGKPNLHTLYW
TGLFSPENLAKTSIKLNGQAELFYRPKSRMKRMAHRLGEKMLNKK
LKDQKTPIPDTLYQELYDYVNHRLSHDLSDEARALLPNVITKEVS
HEIIKDRRFTSDKFFFHVPITLNYQAANSPSKFNQRVNAYLKEHP
ETPIIGIDRGERNLIYITVIDSTGKILEQRSLNTIQQFDYQKKLD
NREKERVAARQAWSVVGTIKDLKQGYLSQVIHEIVDLMIHYQAVV
VLENLNFGFKSKRTGIAEKAVYQQFEKMLIDKLNCLVLKDYPAEK
VGGVLNPYQLTDQFTSFAKMGTQSGFLFYVPAPYTSKIDPLTGFV
DPFVWKTIKNHESRKHFLEGFDFLHYDVKTGDFILHFKMNRNLSF
QRGLPGFMPAWDIVFEKNETQFDAKGTPFIAGKRIVPVIENHRFT
GRYRDLYPANELIALLEEKGIVERDGSNILPKLLENDDSHAIDTM
VALIRSVLQMRNSNAATGEDYINSPVRDLNGVCFDSRFQNPEWPM
DADANGAYHIALKGQLLLNHLKESKDLKLQNGISNQDWLAYIQEL
RNGRSSDDEATADSQHAAPPKKKRKVGGSGGSGGSGGSGGSGGSG
GSGGSLEHHHHHH
Cpf1 variant 3 amino acid sequence
SEQ ID NO: 61
MTQFEGFTNLYQVSKTLRFELIPQGKTLKHIQEQGFIEEDKARND
HYKELKPIIDRIYKTYADQCLQLVQLDWENLSAAIDSYRKEKTEE
TRNALIEEQATYRNAIHDYFIGRTDNLTDAINKRHAEIYKGLFKA
ELFNGKVLKQLGTVTTTEHENALLRSFDKFTTYFSGFYENRKNVF
SAEDISTAIPHRIVQDNFPKFKENCHIFTRLITAVPSLREHFENV
KKAIGIFVSTSIEEVFSFPFYNQLLTQTQIDLYNQLLGGISREAG
TEKIKGLNEVLNLAIQKNDETAHIIASLPHRFIPLFKQILSDRNT
LSFILEEFKSDEEVIQSFCKYKTLLRNENVLETAEALFNELNSID
LTHIFISHKKLETISSALCDHWDTLRNALYERRISELTGKITKSA
KEKVQRSLKHEDINLQEIISAAGKELSEAFKQKTSEILSHAHAAL
DQPLPTTLKKQEEKEILKSQLDSLLGLYHLLDWFAVDESNEVDPE
FSARLTGIKLEMEPSLSFYNKARNYATKKPYSVEKFKLNFQRPTL
ASGWDVNKEKNNGAILFVKNGLYYLGIMPKQKGRYKALSFEPTEK
TSEGFDKMYYDYFPDAAKMIPKCSTQLKAVTAHFQTHTTPILLSN
NFIEPLEITKEIYDLNNPEKEPKKFQTAYAKKTGDQKGYREALCK
WIDFTRDFLSKYTKTTSIDLSSLRPSSQYKDLGEYYAELNPLLYH
ISFQRIAEKEIMDAVETGKLYLFQIYNKDFAKGHHGKPNLHTLYW
TGLFSPENLAKTSIKLNGQAELFYRPKSRMKRMAARLGEKMLNKK
LKDQKTPIPDTLYQELYDYVNHRLSHDLSDEARALLPNVITKEVS
HEIIKDRRFTSDKFLFHVPITLNYQAANSPSKENQRVNAYLKEHP
ETPIIGIDRGERNLIYITVIDSTGKILEQRSLNTIQQFDYQKKLD
NREKERVAARQAWSVVGTIKDLKQGYLSQVIHEIVDLMIHYQAVV
VLENLNFGFKSKRTGIAEKAVYQQFEKMLIDKLNCLVLKDYPAEK
VGGVLNPYQLTDQFTSFAKMGTQSGFLFYVPAPYTSKIDPLTGFV
DPFVWKTIKNHESRKHFLEGFDFLHYDVKTGDFILHFKMNRNLSF
QRGLPGFMPAWDIVFEKNETQFDAKGTPFIAGKRIVPVIENHRFT
GRYRDLYPANELIALLEEKGIVERDGSNILPKLLENDDSHAIDTM
VALIRSVLQMRNSNAATGEDYINSPVRDLNGVCFDSRFQNPEWPM
DADANGAYHIALKGQLLLNHLKESKDLKLQNGISNQDWLAYIQEL
RNGRSSDDEATADSQHAAPPKKKRKVGGSGGSGGSGGSGGSGGSG
GSGGSLEHHHHHH
Cpf1 variant 4 amino acid sequence
SEQ ID NO: 62
MTQFEGFTNLYQVSKTLRFELIPQGKTLKHIQEQGFIEEDKARND
HYKELKPIIDRIYKTYADQCLQLVQLDWENLSAAIDSYRKEKTEE
TRNALIEEQATYRNAIHDYFIGRTDNLTDAINKRHAEIYKGLFKA
ELFNGKVLKQLGTVTTTEHENALLRSFDKFTTYFSGFYENRKNVF
SAEDISTAIPHRIVQDNFPKFKENCHIFTRLITAVPSLREHFENV
KKAIGIFVSTSIEEVFSFPFYNQLLTQTQIDLYNQLLGGISREAG
TEKIKGLNEVLNLAIQKNDETAHIIASLPHRFIPLFKQILSDRNT
LSFILEEFKSDEEVIQSFCKYKTLLRNENVLETAEALFNELNSID
LTHIFISHKKLETISSALCDHWDTLRNALYERRISELTGKITKSA
KEKVQRSLKHEDINLQEIISAAGKELSEAFKQKTSEILSHAHAAL
DQPLPTTLKKQEEKEILKSQLDSLLGLYHLLDWFAVDESNEVDPE
FSARLTGIKLEMEPSLSFYNKARNYATKKPYSVEKFKLNFQRPTL
ASGWDVNKEKNNGAILFVKNGLYYLGIMPKQKGRYKALSFEPTEK
TSEGFDKMYYDYFPDAAKMIPKCSTQLKAVTAHFQTHTTPILLSN
NFIEPLEITKEIYDLNNPEKEPKKFQTAYAKKTGDQKGYREALCK
WIDFTRDFLSKYTKITSIDLSSLRPSSQYKDLGEYYAELNPLLYH
ISFQRIAEKEIMDAVETGKLYLFQIYNKDFAKGHHGKPNLHTLYW
TGLFSPENLAKTSIKLNGQAELFYRPKSRMKRMAARLGEKMLNKK
LKDQKTPIPDTLYQELYDYVNHRLSHDLSDEARALLPNVITKEVS
HEIIKDRRFTSDKFLFHVPITLNYQAANSPSKFNQRVNAYLKEHP
ETPIIGIDRGERNLIYITVIDSTGKILEQRSLNTIQQFDYQKKLD
NREKERVAARQAWSVVGTIKDLKQGYLSQVIHEIVDLMIHYQAVV
VLENLNFGFKSKRTGIAEKAVYQQFEKMLIDKLNCLVLKDYPAEK
VGGVLNPYQLTDQFTSFAKMGTQSGFLFYVPAPYTSKIDPLTGFV
DPFVWKTIKNHESRKHFLEGFDFLHYDVKTGDFILHFKMNRNLSF
QRGLPGFMPAWDIVFEKNETQFDAKGTPFIAGKRIVPVIENHRFT
GRYRDLYPANELIALLEEKGIVERDGSNILPKLLENDDSHAIDTM
VALIRSVLQMRNSNAATGEDYINSPVRDLNGVCFDSRFQNPEWPM
DADANGAYHIALKGQLLLNHLKESKDLKLQNGISNQDWLAYIQEL
RNGRSSDDEATADSQHAAPPKKKRKV
Cpf1 variant 5 amino acid sequence
SEQ ID NO: 63
MTQFEGFTNLYQVSKTLRFELIPQGKTLKHIQEQGFIEEDKARND
HYKELKPIIDRIYKTYADQCLQLVQLDWENLSAAIDSYRKEKTEE
TRNALIEEQATYRNAIHDYFIGRIDNLTDAINKRHAEIYKGLFKA
ELFNGKVLKQLGTVTTTEHENALLRSFDKFTTYFSGFYENRKNVF
SAEDISTAIPHRIVQDNFPKFKENCHIFTRLITAVPSLREHFENV
KKAIGIFVSTSIEEVFSFPFYNQLLTQTQIDLYNQLLGGISREAG
TEKIKGLNEVLNLAIQKNDETAHIIASLPHRFIPLFKQILSDRNT
LSFILEEFKSDEEVIQSFCKYKILLRNENVLETAEALFNELNSID
LTHIFISHKKLETISSALCDHWDTLRNALYERRISELTGKITKSA
KEKVQRSLKHEDINLQEIISAAGKELSEAFKQKTSEILSHAHAAL
DQPLPTTLKKQEEKEILKSQLDSLLGLYHLLDWFAVDESNEVDPE
FSARLTGIKLEMEPSLSFYNKARNYATKKPYSVEKFKLNFQRPTL
ASGWDVNKEKNNGAILFVKNGLYYLGIMPKQKGRYKALSFEPTEK
TSEGFDKMYYDYFPDAAKMIPKCSTQLKAVTAHFQTHTTPILLSN
NFIEPLEITKEIYDLNNPEKEPKKFQTAYAKKTGDQKGYREALCK
WIDFTRDFLSKYTKITSIDLSSLRPSSQYKDLGEYYAELNPLLYH
ISFQRIAEKEIMDAVETGKLYLFQIYNKDFAKGHHGKPNLHTLYW
TGLFSPENLAKTSIKLNGQAELFYRPKSRMKRMAHRLGEKMLNKK
LKDQKTPIPDTLYQELYDYVNHRLSHDLSDEARALLPNVITKEVS
HEIIKDRRFTSDKFLFHVPITLNYQAANSPSKFNQRVNAYLKEHP
ETPIIGIDRGERNLIYITVIDSTGKILEQRSLNTIQQFDYQKKLD
NREKERVAARQAWSVVGTIKDLKQGYLSQVIHEIVDLMIHYQAVV
VLENLNFGFKSKRIGIAEKAVYQQFEKMLIDKLNCLVLKDYPAEK
VGGVLNPYQLTDQFTSFAKMGTQSGFLFYVPAPYTSKIDPLTGFV
DPFVWKTIKNHESRKHFLEGFDFLHYDVKTGDFILHFKMNRNLSF
QRGLPGFMPAWDIVFEKNETQFDAKGTPFIAGKRIVPVIENHRFT
GRYRDLYPANELIALLEEKGIVERDGSNILPKLLENDDSHAIDTM
VALIRSVLQMRNSNAATGEDYINSPVRDLNGVCFDSRFQNPEWPM
DADANGAYHIALKGQLLLNHLKESKDLKLQNGISNQDWLAYIQEL
RNGRSSDDEATADSQHAAPPKKKRKV
Cpf1 variant 6 amino acid sequence
SEQ ID NO: 64
MTQFEGFTNLYQVSKTLRFELIPQGKTLKHIQEQGFIEEDKARND
HYKELKPIIDRIYKTYADQCLQLVQLDWENLSAAIDSYRKEKTEE
TRNALIEEQATYRNAIHDYFIGRTDNLTDAINKRHAEIYKGLFKA
ELFNGKVLKQLGTVTTTEHENALLRSFDKFTTYFSGFYENRKNVF
SAEDISTAIPHRIVQDNFPKFKENCHIFTRLITAVPSLREHFENV
KKAIGIFVSTSIEEVFSFPFYNQLLTQTQIDLYNQLLGGISREAG
TEKIKGLNEVLNLAIQKNDETAHIIASLPHRFIPLFKQILSDRNT
LSFILEEFKSDEEVIQSFCKYKTLLRNENVLETAEALFNELNSID
LTHIFISHKKLETISSALCDHWDTLRNALYERRISELTGKITKSA
KEKVQRSLKHEDINLQEIISAAGKELSEAFKQKTSEILSHAHAAL
DQPLPTTLKKQEEKEILKSQLDSLLGLYHLLDWFAVDESNEVDPE
FSARLTGIKLEMEPSLSFYNKARNYATKKPYSVEKFKLNFQRPTL
ASGWDVNKEKNNGAILFVKNGLYYLGIMPKQKGRYKALSFEPTEK
TSEGFDKMYYDYFPDAAKMIPKCSTQLKAVTAHFQTHTTPILLSN
NFIEPLEITKEIYDLNNPEKEPKKFQTAYAKKTGDQKGYREALCK
WIDFTRDFLSKYTKTTSIDLSSLRPSSQYKDLGEYYAELNPLLYH
ISFQRIAEKEIMDAVETGKLYLFQIYNKDFAKGHHGKPNLHTLYW
TGLFSPENLAKTSIKLNGQAELFYRPKSRMKRMAHRLGEKMLNKK
LKDQKTPIPDTLYQELYDYVNHRLSHDLSDEARALLPNVITKEVS
HEIIKDRRFTSDKFLFHVPITLNYQAANSPSKFNQRVNAYLKEHP
ETPIIGIDRGERNLIYITVIDSTGKILEQRSLNTIQQFDYQKKLD
NREKERVAARQAWSVVGTIKDLKQGYLSQVIHEIVDLMIHYQAVV
VLENLNFGFKSKRTGIAEKAVYQQFEKMLIDKLNCLVLKDYPAEK
VGGVLNPYQLTDQFTSFAKMGTQSGFLFYVPAPYTSKIDPLTGFV
DPFVWKTIKNHESRKHFLEGFDFLHYDVKTGDFILHFKMNRNLSF
QRGLPGFMPAWDIVFEKNETQFDAKGTPFIAGKRIVPVIENHRFT
GRYRDLYPANELIALLEEKGIVERDGSNILPKLLENDDSHAIDTM
VALIRSVLQMRNSNAATGEDYINSPVRDLNGVCFDSRFQNPEWPM
DADANGAYHIALKGQLLLNHLKESKDLKLQNGISNQDWLAYIQEL
RNGRSSDDEATADSQHAAPPKKKRKVGGSGGSGGSGGSGGSGGSG
GSGGSLEHHHHHH
Cpf1 variant 7 amino acid sequence
SEQ ID NO: 65
MGRDPGKPIPNPLLGLDSTAPKKKRKVGIHGVPAATQFEGFTNLY
QVSKTLRFELIPQGKTLKHIQEQGFIEEDKARNDHYKELKPIIDR
IYKTYADQCLQLVQLDWENLSAAIDSYRKEKTEETRNALIEEQAT
YRNAIHDYFIGRTDNLTDAINKRHAEIYKGLFKAELFNGKVLKQL
GTVTTTEHENALLRSFDKFTTYFSGFYENRKNVFSAEDISTAIPH
RIVQDNFPKFKENCHIFTRLITAVPSLREHFENVKKAIGIFVSTS
IEEVFSFPFYNQLLTQTQIDLYNQLLGGISREAGTEKIKGLNEVL
NLAIQKNDETAHIIASLPHRFIPLFKQILSDRNILSFILEEFKSD
EEVIQSFCKYKTLLRNENVLETAEALFNELNSIDLTHIFISHKKL
ETISSALCDHWDTLRNALYERRISELTGKITKSAKEKVQRSLKHE
DINLQEIISAAGKELSEAFKQKTSEILSHAHAALDQPLPTTLKKQ
EEKEILKSQLDSLLGLYHLLDWFAVDESNEVDPEFSARLTGIKLE
MEPSLSFYNKARNYATKKPYSVEKFKLNFQMPTLASGWDVNKEKN
NGAILFVKNGLYYLGIMPKQKGRYKALSFEPTEKTSEGFDKMYYD
YFPDAAKMIPKCSTQLKAVTAHFQTHTTPILLSNNFIEPLEITKE
IYDLNNPEKEPKKFQTAYAKKTGDQKGYREALCKWIDFTRDFLSK
YTKITSIDLSSLRPSSQYKDLGEYYAELNPLLYHISFQRIAEKEI
MDAVETGKLYLFQIYNKDFAKGHHGKPNLHTLYWTGLFSPENLAK
TSIKLNGQAELFYRPKSRMKRMAHRLGEKMLNKKLKDQKTPIPDT
LYQELYDYVNHRLSHDLSDEARALLPNVITKEVSHEIIKDRRFTS
DKFFFHVPITLNYQAANSPSKFNQRVNAYLKEHPETPIIGIDRGE
RNLIYITVIDSTGKILEQRSLNTIQQFDYQKKLDNREKERVAARQ
AWSVVGTIKDLKQGYLSQVIHEIVDLMIHYQAVVVLENLNFGFKS
KRTGIAEKAVYQQFEKMLIDKLNCLVLKDYPAEKVGGVLNPYQLT
DQFTSFAKMGTQSGFLFYVPAPYTSKIDPLTGFVDPFVWKTIKNH
ESRKHFLEGFDFLHYDVKTGDFILHFKMNRNLSFQRGLPGFMPAW
DIVFEKNETQFDAKGTPFIAGKRIVPVIENHRFTGRYRDLYPANE
LIALLEEKGIVERDGSNILPKLLENDDSHAIDTMVALIRSVLQMR
NSNAATGEDYINSPVRDLNGVCFDSRFQNPEWPMDADANGAYHIA
LKGQLLLNHLKESKDLKLQNGISNQDWLAYIQELRNPKKKRKVKL
AAALEHHHHHH
Exemplary AsCpf1 wild-type amino acid sequence
SEQ ID NO: 66
MTQFEGFTNLYQVSKTLRFELIPQGKTLKHIQEQGFIEEDKARND
HYKELKPIIDRIYKTYADQCLQLVQLDWENLSAAIDSYRKEKTEE
TRNALIEEQATYRNAIHDYFIGRTDNLTDAINKRHAEIYKGLFKA
ELFNGKVLKQLGTVTTTEHENALLRSFDKFTTYFSGFYENRKNVF
SAEDISTAIPHRIVQDNFPKFKENCHIFTRLITAVPSLREHFENV
KKAIGIFVSTSIEEVFSFPFYNQLLTQTQIDLYNQLLGGISREAG
TEKIKGLNEVLNLAIQKNDETAHIIASLPHRFIPLFKQILSDRNT
LSFILEEFKSDEEVIQSFCKYKILLRNENVLETAEALFNELNSID
LTHIFISHKKLETISSALCDHWDTLRNALYERRISELTGKITKSA
KEKVQRSLKHEDINLQEIISAAGKELSEAFKQKTSEILSHAHAAL
DQPLPTTLKKQEEKEILKSQLDSLLGLYHLLDWFAVDESNEVDPE
FSARLTGIKLEMEPSLSFYNKARNYATKKPYSVEKFKLNFQMPTL
ASGWDVNKEKNNGAILFVKNGLYYLGIMPKQKGRYKALSFEPTEK
TSEGFDKMYYDYFPDAAKMIPKCSTQLKAVTAHFQTHTTPILLSN
NFIEPLEITKEIYDLNNPEKEPKKFQTAYAKKTGDQKGYREALCK
WIDFTRDFLSKYTKTTSIDLSSLRPSSQYKDLGEYYAELNPLLYH
ISFQRIAEKEIMDAVETGKLYLFQIYNKDFAKGHHGKPNLHTLYW
TGLFSPENLAKTSIKLNGQAELFYRPKSRMKRMAHRLGEKMLNKK
LKDQKTPIPDTLYQELYDYVNHRLSHDLSDEARALLPNVITKEVS
HEIIKDRRFTSDKFFFHVPITLNYQAANSPSKFNQRVNAYLKEHP
ETPIIGIDRGERNLIYITVIDSTGKILEQRSLNTIQQFDYQKKLD
NREKERVAARQAWSVVGTIKDLKQGYLSQVIHEIVDLMIHYQAVV
VLENLNFGFKSKRTGIAEKAVYQQFEKMLIDKLNCLVLKDYPAEK
VGGVLNPYQLTDQFTSFAKMGTQSGFLFYVPAPYTSKIDPLTGFV
DPFVWKTIKNHESRKHFLEGFDFLHYDVKTGDFILHFKMNRNLSF
QRGLPGFMPAWDIVFEKNETQFDAKGTPFIAGKRIVPVIENHRFT
GRYRDLYPANELIALLEEKGIVERDGSNILPKLLENDDSHAIDTM
VALIRSVLQMRNSNAATGEDYINSPVRDLNGVCFDSRFQNPEWPM
DADANGAYHIALKGQLLLNHLKESKDLKLQNGISNQDWLAYIQEL
RN

[0274] Additional suitable nucleases and nuclease variants will be apparent to the skilled artisan based on the present disclosure in view of the knowledge in the art. Exemplary suitable nucleases may include, but are not limited to those provided in Table 5.

TABLE 5
Exemplary Suitable CRISPR/Cas Nucleases

| | Length | | |
|---|---|---|---|
| Nuclease | (A.A.) | PAM | Reference |
| SpCas9 | 1368 | NGG | Cong et al., Science 2013; 339(6121): 819-23 |
| SaCas9 | 1053 | NNGRRT | Ran et al., Nature 2015; 520(7546): 186-91. |
| (KKH) | 1067 | NNNRRT | Kleinstiver et al., Nat Biotechnol. 2015; |
| SaCas9 | | | 33(12): 1293-1298 |
| AsCpf1 | 1353 | TTTV | Zetsche et al., Nat Biotechnol. 2017; 35(1): 31-34. |
| (AsCas12a) | | | |
| LbCpf1 | 1274 | TTTV | Zetsche et al., Cell 2015; 163(3): 759-71. |
| (LbCas12a) | | | |
| CasX | 980 | TTC | Burstein et al., Nature 2017; 542(7640): 237-241. |
| CasY | 1200 | TA | Burstein et al., Nature 2017; 542(7640): 237-241. |
| Cas12h1 | 870 | RTR | Yan et al., Science 2019; 363(6422): 88-91. |
| Cas12i1 | 1093 | TTN | Yan et al., Science 2019; 363(6422): 88-91. |
| Cas12i2 | 1054 | TTN | Yan et al., Science 2019; 363(6422): 88-91. |
| Cas12c1 | unknown | TG | Yan et al., Science 2019; 363(6422): 88-91. |
| Cas12c2 | unknown | TN | Yan et al., Science 2019; 363(6422): 88-91. |
| eSpCas9 | 1423 | NGG | Chen et al., Nature 2017; 550(7676): 407-410. |
| Cas9-HF1 | 1367 | NGG | Chen et al., Nature 2017; 550(7676): 407-410. |
| HypaCas9 | 1404 | NGG | Chen et al., Nature 2017; 550(7676): 407-410. |
| dCas9-Fokl | 1623 | NGG | U.S. Pat. No. 9,322,037 |
| Sniper-Cas9 | 1389 | NGG | Lee et al., Nat Commun. 2018; 9(1): 3048. |
| xCas9 | 1786 | NGG, NG, | Hu et al., Nature. 2018 Apr 5; 556(7699): 57-63. |
| | | GAA, GAT | |
| AaCas12b | 1129 | TTN | Teng et al., Cell Discov. 2018; 4: 63. |
| evoCas9 | 1423 | NGG | Casini et al., Nat Biotechnol. 2018; 36(3): 265-271. |
| SpCas9-NG | 1423 | NG | Nishimasu et al., Science 2018; |
| | | | 361(6408): 1259-1262. |
| VRQR | 1368 | NGA | Li et al., The CRISPR Journal, 2018; 01: 01 |
| VRER | 1372 | NGCG | Kleinstiver et al., Nature 2016; 529(7587): 490-5. |
| NmeCas9 | 1082 | NNNNGATT | Amrani et al., Genome Biol. 2018; 19(1): 214. |
| CjCas9 | 984 | NNNNRYAC | Kim et al., Nat Commun. 2017; 8: 14500. |
| BhCas12b | 1108 | ATTN | Strecker et al., Nat Commun. 2019; 10(1): 212. |
| BhCas12b V4 | 1108 | ATTN | Pausch et al., Science 2020; 369(6501): 333-337. |

Guide RNA (gRNA) Molecules

[0275] Guide RNAs (gRNAs) of the present disclosure may be unimolecular (comprising a single RNA molecule, and referred to alternatively as chimeric), or modular (comprising more than one, and typically two, separate RNA molecules, such as a crRNA and a tracrRNA, which are usually associated with one another, for instance by duplexing). gRNAs and their component parts are described throughout the literature, for instance in Briner et al., Molecular Cell 2014; 56(2):333-339 (“Briner”), and in PCT Publication No. WO2016/073990A1.

[0276] In bacteria and archaea, type II CRISPR systems generally comprise an CRISPR/Cas nuclease protein such as Cas9, a CRISPR RNA (crRNA) that includes a 5′ region that is complementary to a foreign sequence, and a trans-activating crRNA (tracrRNA) that includes a 5′ region that is complementary to, and forms a duplex with, a 3′ region of the crRNA. While not intending to be bound by any theory, it is thought that this duplex facilitates the formation of—and is necessary for the activity of—the Cas9/gRNA complex. As type II CRISPR systems were adapted for use in gene editing, it was discovered that the crRNA and tracrRNA could be joined into a single unimolecular or chimeric guide RNA, in one non-limiting example, by means of a four nucleotide (e.g., GAAA) “tetraloop” or “linker” sequence bridging complementary regions of the crRNA (at its 3′ end) and the tracrRNA (at its 5′ end). See Mali et al., Science 2013; 339(6121):823-826 (“Mali”); Jiang et al., Nat Biotechnol. 2013; 31(3):233-239 (“Jiang”); and Jinek et al., Science 2012; 337(6096):816-821 (“Jinek 2012”).

[0277] Guide RNAs, whether unimolecular or modular, include a “targeting domain” that is fully or partially complementary to a target domain within a target sequence, such as a DNA sequence in the genome of a cell where editing is desired. Targeting domains are referred to by various names in the literature, including without limitation “guide sequences” (Hsu et al., Nat Biotechnol. 2013; 31(9):827-832, (“Hsu”)), “complementarity regions” (PCT Publication No. WO2016/073990A1), “spacers” (Briner) and generically as “crRNAs” (Jiang). Irrespective of the names they are given, targeting domains are typically 10-30 nucleotides in length, and in certain embodiments are 16-24 nucleotides in length (for instance, 16, 17, 18, 19, 20, 21, 22, 23 or 24 nucleotides in length), and are at or near the 5′ terminus of in the case of a Cas9 gRNA, and at or near the 3′ terminus in the case of a Cpf1 gRNA.

[0278] In addition to the targeting domains, gRNAs typically (but not necessarily, as discussed below) include a plurality of domains that may influence the formation or activity of gRNA/Cas9 complexes. For instance, as mentioned above, the duplexed structure formed by first and secondary complementarity domains of a gRNA (also referred to as a repeat:anti-repeat duplex) interacts with the recognition (REC) lobe of Cas9 and can mediate the formation of Cas9/gRNA complexes. See Nishimasu 2014 and 2015. It should be noted that the first and/or second complementarity domains may contain one or more poly-A tracts, which can be recognized by RNA polymerases as a termination signal. The sequence of the first and second complementarity domains are, therefore, optionally modified to eliminate these tracts and promote the complete in vitro transcription of gRNAs, for instance through the use of A-G swaps as described in Briner, or A-U swaps. These and other similar modifications to the first and second complementarity domains are within the scope of the present disclosure.

[0279] Along with the first and second complementarity domains, Cas9 gRNAs typically include two or more additional duplexed regions that are involved in nuclease activity in vivo but not necessarily in vitro. See Nishimasu 2015. A first stem-loop one near the 3′ portion of the second complementarity domain is referred to variously as the “proximal domain,” (PCT Publication No. WO2016/073990A1) “stem loop 1” (Nishimasu 2014 and 2015) and the “nexus” (Briner). One or more additional stem loop structures are generally present near the 3′ end of the gRNA, with the number varying by species: S. pyogenes gRNAs typically include two 3′ stem loops (for a total of four stem loop structures including the repeat:anti-repeat duplex), while S. aureus and other species have only one (for a total of three stem loop structures). A description of conserved stem loop structures (and gRNA structures more generally) organized by species is provided in Briner.

[0280] While the foregoing description has focused on gRNAs for use with Cas9, it should be appreciated that other CRISPR/Cas nucleases have been (or may in the future be) discovered or invented which utilize gRNAs that differ in some ways from those described to this point. For instance, Cpf1 (“CRISPR from Prevotella and Franciscella 1”) which is also called Cas12a is a CRISPR/Cas nuclease that does not require a tracrRNA to function (see Zetsche et al., Cell 2015; 163:759-771 (“Zetsche I”)). A gRNA for use in a Cpf1 genome editing system generally includes a targeting domain and a complementarity domain (alternately referred to as a “handle”). It should also be noted that, in gRNAs for use with Cpf1, the targeting domain is usually present at or near the 3′ end, rather than the 5′ end as described above in connection with Cas9 gRNAs (the handle is at or near the 5′ end of a Cpf1 gRNA).

[0281] Those of skill in the art will appreciate, however, that although structural differences may exist between gRNAs from different prokaryotic species, or between Cpf1 and Cas9 gRNAs, the principles by which gRNAs operate are generally consistent. Because of this consistency of operation, gRNAs can be defined, in broad terms, by their targeting domain sequences, and skilled artisans will appreciate that a given targeting domain sequence can be incorporated in any suitable gRNA, including a unimolecular or chimeric gRNA, or a gRNA that includes one or more chemical modifications and/or sequential modifications (substitutions, additional nucleotides, truncations, etc.). Thus, for economy of presentation in this disclosure, gRNAs may be described solely in terms of their targeting domain sequences.

[0282] More generally, skilled artisans will appreciate that some aspects of the present disclosure relate to systems, methods and compositions that can be implemented using multiple CRISPR/Cas nucleases. For this reason, unless otherwise specified, the term gRNA should be understood to encompass any suitable gRNA that can be used with any CRISPR/Cas nuclease, and not only those gRNAs that are compatible with a particular species of Cas9 or Cpf1. By way of illustration, the term gRNA can, in certain embodiments, include a gRNA for use with any CRISPR/Cas nuclease occurring in a Class 2 CRISPR system, such as a type II or type V or CRISPR system, or an CRISPR/Cas nuclease derived or adapted therefrom.

[0283] In some embodiments a method or system of the present disclosure may use more than one gRNA. In some embodiments, two or more gRNAs may be used to create two or more double strand breaks in the genome of a cell. In some embodiments, a multiplexed editing strategy may be used that targets two or more essential genes at the same time with two or more knock-in cassettes. In some such embodiments, the two or more knock-in cassettes may comprise different exogenous cargo sequences, e.g., different knock-in cassettes may encode different gene products of interest and thus the edited cells will express a plurality of gene products of interest from different knock-in cassettes targeted to different loci.

[0284] In some embodiments using more than one gRNA, a double-strand break may be caused by a dual-gRNA paired “nickase” strategy. In some embodiments for selecting gRNAs, including the determination for which gRNAs can be used for the dual-gRNA paired “nickase” strategy, gRNA pairs should be oriented on the DNA such that PAMs are facing out and cutting with the D10A Cas9 nickase will result in 5′ overhangs.

[0285] In some embodiments, a method or system of the present disclosure may use a prime editing gRNA (pegRNA) in conjunction with a prime editor (PE). As is well known in the art, a pegRNA is substantially larger than standard gRNAs, e.g., in some embodiments longer than 50, 100, 150 or 250 nucleotides, e.g., as described in Anzalone et al., Nature 2019; 576:149-157, the entire contents of which are incorporated herein by reference. The pegRNA is a gRNA with a primer binding sequence (PBS) and a donor template containing the desired RNA sequence added at one of the termini, e.g., the 3′ end. The PE:pegRNA complex binds to the target DNA, and the nickase domain of the prime editor nicks only one strand, generating a flap. The PBS, located on the pegRNA, binds to the DNA flap and the edited RNA sequence is reverse transcribed using the reverse transcriptase domain of the prime editor. The edited strand is incorporated into the DNA at the end of the nicked flap, and the target DNA is repaired with the new reverse transcribed DNA. The original DNA segment is removed by a cellular endonuclease. This leaves one strand edited, and one strand unedited. In the newest PE systems, e.g., PE3 and PE3b, the unedited strand can be corrected to match the newly edited strand by using an additional standard gRNA. In this case, the unedited strand is nicked by a nickase and the newly edited strand is used as a template to repair the nick, thus completing the edit.

gRNA Design

[0286] Methods for selection and validation of target sequences as well as off-target analyses have been described previously, e.g., in Mali; Hsu; Fu et al., Nat Biotechnol 2014; 32(3):279-84, Heigwer et al., Nat methods 2014; 11(2):122-3; Bae et al., Bioinformatics 2014; 30(10):1473-5; and Xiao et al. Bioinformatics 2014; 30(8):1180-1182. As a non-limiting example, gRNA design may involve the use of a software tool to optimize the choice of potential target sequences corresponding to a user's target sequence, e.g., to minimize total off-target activity across the genome. While off-target activity is not limited to cleavage, the cleavage efficiency at each off-target sequence can be predicted, e.g., using an experimentally-derived weighting scheme. These and other guide selection methods are described in detail in PCT Publication No. WO2016/073990A1.

[0287] For example, methods for selection and validation of target sequences as well as off-target analyses can be performed using cas-offinder (Bae et al., Bioinformatics 2014; 30:1473-5). Cas-offinder is a tool that can quickly identify all sequences in a genome that have up to a specified number of mismatches to a guide sequence.

[0288] As another example, methods for scoring how likely a given sequence is to be an off-target (e.g., once candidate target sequences are identified) can be performed. An exemplary score includes a Cutting Frequency Determination (CFD) score, as described by Doench et al., Nat Biotechnol. 2016; 34:184-91.

gRNA Modifications

[0289] In certain embodiments, gRNAs as used herein may be modified or unmodified gRNAs. In certain embodiments, a gRNA may include one or more modifications. In certain embodiments, the one or more modifications may include a phosphorothioate linkage modification, a phosphorodithioate (PS2) linkage modification, a 2′-O-methyl modification, or combinations thereof. In certain embodiments, the one or more modifications may be at the 5′ end of the gRNA, at the 3′ end of the gRNA, or combinations thereof.

[0290] In certain embodiments, a gRNA modification may comprise one or more phosphorodithioate (PS2) linkage modifications.

[0291] In some embodiments, a gRNA used herein includes one or more or a stretch of deoxyribonucleic acid (DNA) bases, also referred to herein as a “DNA extension.” In some embodiments, a gRNA used herein includes a DNA extension at the 5′ end of the gRNA, the 3′ end of the gRNA, or a combination thereof. In certain embodiments, the DNA extension may be 1, 2, 3, 4, 5, 6, 7, 8, 9, 10, 11, 12, 13, 14, 15, 16, 17, 18, 19, 20, 21, 22, 23, 24, 25, 26, 27, 28, 29, 30, 31, 32, 33, 34, 35, 36, 37, 38, 39, 40, 41, 42, 43, 44, 45, 46, 47, 48, 49, 50, 51, 52, 53, 54, 55, 56, 57, 58, 59, 60, 61, 62, 63, 64, 65, 66, 67, 68, 69, 70, 71, 72, 73, 74, 75, 76, 77, 78, 79, 80, 81, 82, 83, 84, 85, 86, 87, 88, 89, 90, 91, 92, 93, 94, 95, 96, 97, 98, 99, or 100 DNA bases long. For example, in certain embodiments, the DNA extension may be 1, 2, 3, 4, 5, 10, 15, 20, or 25 DNA bases long. In certain embodiments, the DNA extension may include one or more DNA bases selected from adenine (A), guanine (G), cytosine (C), or thymine (T). In certain embodiments, the DNA extension includes the same DNA bases. For example, the DNA extension may include a stretch of adenine (A) bases. In certain embodiments, the DNA extension may include a stretch of thymine (T) bases. In certain embodiments, the DNA extension includes a combination of different DNA bases.

[0292] Exemplary suitable 5′ extensions for Cpf1 guide RNAs are provided in Table 6 below:

TABLE 6
Exemplary Cpf1 gRNA 5′ Extensions

| SEQ ID | | 5′ |
|---|---|---|
| NO: | 5′ extension sequence | modification |
| N/A | rCrUrUrUrU | +5 RNA |
| 67 | rArArGrArCrCrUrUrUrU | +10 RNA |
| 68 | rArUrGrUrGrUrUrUrUrUrGrUrCrArArArArGrArCr | +25 RNA |
| | CrUrUrUrU | |
| 69 | rArGrGrCrCrArGrCrUrUrGrCrCrGrGrUrUrUrUrUr | +60 RNA |
| | UrArGrUrCrGrUrGrCrUrGrCrUrUrCrArUrGrUrGr | |
| | UrUrUrUrUrGrUrCrArArArArGrArCrCrUrUrUrU | |
| N/A | CTTTT | +5 DNA |
| 70 | AAGACCTTTT | +10 DNA |
| 71 | ATGTGTTTTTGTCAAAAGACCTTTT | +25 DNA |
| 72 | AGGCCAGCTTGCCGGTTTTTTAGTCGTGCTGC | +60 DNA |
| | TTCATGTGTTTTTGTCAAAAGACCTTTT | |
| 73 | TTTTTGTCAAAAGACCTTTT | +20 DNA |
| 74 | GCTTCATGTGTTTTTGTCAAAAGACCTTTT | +30 DNA |
| 75 | GCCGGTTTTTTAGTCGTGCTGCTTCATGTGTT | +50 DNA |
| | TTTGTCAAAAGACCTTTT | |
| 76 | TAGTCGTGCTGCTTCATGTGTTTTTGTCAAAA | +40 DNA |
| | GACCTTTT | |
| 77 | C*C*GAAGTTTTCTTCGGTTTT | +20 DNA + |
| | | 2× PS |
| 78 | T*T*TTTCCGAAGTTTTCTTCGGTTTT | +25 DNA + |
| | | 2× PS |
| 79 | A*A*CGCTTTTTCCGAAGTTTTCTTCGGTTTT | +30 DNA + |
| | | 2× PS |
| 80 | G*C*GTTGTTTTCAACGCTTTTTCCGAAGTTTT | +41 DNA + |
| | CTTCGGTTTT | 2× PS |
| 81 | G*G*CTTCTTTTGAAGCCTTTTTGCGTTGTTTT | +62 DNA + |
| | CAACGCTTTTTCCGAAGTTTTCTTCGGTTTT | 2× PS |
| 82 | A*T*GTGTTTTTGTCAAAAGACCTTTT | +25 DNA + |
| | | 2× PS |
| 83 | AAAAAAAAAAAAAAAAAAAAAAAAA | +25 A |
| 84 | TTTTTTTTTTTTTTTTTTTTTTTTT | +25 T |
| 85 | mA*mU*rGrUrGrUrUrUrUrUrGrUrCrArArArArGr | +25 RNA |
| | ArCrCrUrUrUrU | + 2× PS |
| 86 | mA*mA*rArArArArArArArArArArArArArArArAr | PolyA RNA |
| | ArArArArArArA | + 2× PS |
| 87 | mU*mU*rUrUrUrUrUrUrUrUrUrUrUrUrUrUrUrUr | PolyU RNA |
| | UrUrUrUrUrUrU | + 2× PS |

[0293] In certain embodiments, a gRNA used herein includes a DNA extension as well as a chemical modification, e.g., one or more phosphorothioate linkage modifications, one or more phosphorodithioate (PS2) linkage modifications, one or more 2′-O-methyl modifications, or one or more additional suitable chemical gRNA modification disclosed herein, or combinations thereof. In certain embodiments, the one or more modifications may be at the 5′ end of the gRNA, at the 3′ end of the gRNA, or combinations thereof.

[0294] Without wishing to be bound by theory, it is contemplated that any DNA extension may be used with any gRNA disclosed herein, so long as it does not hybridize to the target nucleic acid being targeted by the gRNA and it also exhibits an increase in editing at the target nucleic acid site relative to a gRNA which does not include such a DNA extension.

[0295] In some embodiments, a gRNA used herein includes one or more or a stretch of ribonucleic acid (RNA) bases, also referred to herein as an “RNA extension.” In some embodiments, a gRNA used herein includes an RNA extension at the 5′ end of the gRNA, the 3′ end of the gRNA, or a combination thereof. In certain embodiments, the RNA extension may be 1, 2, 3, 4, 5, 6, 7, 8, 9, 10, 11, 12, 13, 14, 15, 16, 17, 18, 19, 20, 21, 22, 23, 24, 25, 26, 27, 28, 29, 30, 31, 32, 33, 34, 35, 36, 37, 38, 39, 40, 41, 42, 43, 44, 45, 46, 47, 48, 49, 50, 51, 52, 53, 54, 55, 56, 57, 58, 59, 60, 61, 62, 63, 64, 65, 66, 67, 68, 69, 70, 71, 72, 73, 74, 75, 76, 77, 78, 79, 80, 81, 82, 83, 84, 85, 86, 87, 88, 89, 90, 91, 92, 93, 94, 95, 96, 97, 98, 99, or 100 RNA bases long. For example, in certain embodiments, the RNA extension may be 1, 2, 3, 4, 5, 10, 15, 20, or 25 RNA bases long. In certain embodiments, the RNA extension may include one or more RNA bases selected from adenine (rA), guanine (rG), cytosine (rC), or uracil (rU), in which the “r” represents RNA, 2′-hydroxy. In certain embodiments, the RNA extension includes the same RNA bases. For example, the RNA extension may include a stretch of adenine (rA) bases. In certain embodiments, the RNA extension includes a combination of different RNA bases. In certain embodiments, a gRNA used herein includes an RNA extension as well as one or more phosphorothioate linkage modifications, one or more phosphorodithioate (PS2) linkage modifications, one or more 2′-O-methyl modifications, one or more additional suitable gRNA modification, e.g., chemical modification, disclosed herein, or combinations thereof. In certain embodiments, the one or more modifications may be at the 5′ end of the gRNA, at the 3′ end of the gRNA, or combinations thereof. In certain embodiments, a gRNA including an RNA extension may comprise a sequence set forth herein.

[0296] It is contemplated that gRNAs used herein may also include an RNA extension and a DNA extension. In certain embodiments, the RNA extension and DNA extension may both be at the 5′ end of the gRNA, the 3′ end of the gRNA, or a combination thereof. In certain embodiments, the RNA extension is at the 5′ end of the gRNA and the DNA extension is at the 3′ end of the gRNA. In certain embodiments, the RNA extension is at the 3′ end of the gRNA and the DNA extension is at the 5′ end of the gRNA.

[0297] In some embodiments, a gRNA which includes a modification, e.g., a DNA extension at the 5′ end and/or a chemical modification as disclosed herein, is complexed with a CRISPR/Cas nuclease, e.g., an AsCpf1 nuclease, to form an RNP, which is then employed to edit a target cell, e.g., a pluripotent stem cell or a progeny thereof.

[0298] Certain exemplary modifications discussed in this section can be included at any position within a gRNA sequence including, without limitation at or near the 5′ end (e.g., within 1-10, 1-5, or 1-2 nucleotides of the 5′ end) and/or at or near the 3′ end (e.g., within 1-10, 1-5, or 1-2 nucleotides of the 3′ end). In some cases, modifications are positioned within functional motifs, such as the repeat-anti-repeat duplex of a Cas9 gRNA, a stem loop structure of a Cas9 or Cpf1 gRNA, and/or a targeting domain of a gRNA.

[0299] As one example, the 5′ end of a gRNA can include a eukaryotic mRNA cap structure or cap analog (e.g., a G(5′)ppp(5′)G cap analog, a m7G(5′)ppp(5′)G cap analog, or a 3′-0-Me-m7G(5′)ppp(5′)G anti reverse cap analog (ARCA)), as shown below:

[chemical structure]

[0300] The cap or cap analog can be included during either chemical or enzymatic synthesis of the gRNA.

[0301] Along similar lines, the 5′ end of the gRNA can lack a 5′ triphosphate group. For instance, in vitro transcribed gRNAs can be phosphatase-treated (e.g., using calf intestinal alkaline phosphatase) to remove a 5′ triphosphate group.

[0302] Another common modification involves the addition, at the 3′ end of a gRNA, of a plurality (e.g., 1-10, 10-20, or 25-200) of adenine (A) residues referred to as a polyA tract. The polyA tract can be added to a gRNA during chemical or enzymatic synthesis, using a polyadenosine polymerase (e.g., E. coli Poly(A)Polymerase).

[0303] Guide RNAs can be modified at a 3′ terminal U ribose. For example, the two terminal hydroxyl groups of the U ribose can be oxidized to aldehyde groups and a concomitant opening of the ribose ring to afford a modified nucleoside as shown below:

[chemical structure]

wherein “U” can be an unmodified or modified uridine.

[0304] The 3′ terminal U ribose can be modified with a 2′3′ cyclic phosphate as shown below:

[chemical structure]

wherein “U” can be an unmodified or modified uridine.

[0305] Guide RNAs can contain 3′ nucleotides that can be stabilized against degradation, e.g., by incorporating one or more of the modified nucleotides described herein. In certain embodiments, uridines can be replaced with modified uridines, e.g., 5-(2-amino)propyl uridine, and 5-bromo uridine, or with any of the modified uridines described herein; adenosines and guanosines can be replaced with modified adenosines and guanosines, e.g., with modifications at the 8-position, e.g., 8-bromo guanosine, or with any of the modified adenosines or guanosines described herein.

[0306] In certain embodiments, sugar-modified ribonucleotides can be incorporated into a gRNA, e.g., wherein the 2′ OH-group is replaced by a group selected from H, —OR, —R (wherein R can be, e.g., alkyl, cycloalkyl, aryl, aralkyl, heteroaryl or sugar), halo, —SH, —SR (wherein R can be, e.g., alkyl, cycloalkyl, aryl, aralkyl, heteroaryl or sugar), amino (wherein amino can be, e.g., NH₂, alkylamino, dialkylamino, heterocyclyl, arylamino, diarylamino, heteroarylamino, diheteroarylamino, or amino acid); or cyano (—CN). In certain embodiments, the phosphate backbone can be modified as described herein, e.g., with a phosphothioate (PhTx) group. In certain embodiments, one or more of the nucleotides of the gRNA can each independently be a modified or unmodified nucleotide including, but not limited to 2′-sugar modified, such as, 2′-O-methyl, 2′-O-methoxyethyl, or 2′-Fluoro modified including, e.g., 2′-F or 2′-O-methyl, adenosine (A), 2′-F or 2′-O-methyl, cytidine (C), 2′-F or 2′-O-methyl, uridine (U), 2′-F or 2′-O-methyl, thymidine (T), 2′-F or 2′-O-methyl, guanosine (G), 2′-O-methoxyethyl-5-methyluridine (Teo), 2′-O-methoxyethyladenosine (Aeo), 2′-O-methoxyethyl-5-methylcytidine (m5Ceo), and any combinations thereof.

[0307] Guide RNAs can also include “locked” nucleic acids (LNA) in which the 2′ OH-group can be connected, e.g., by a C1-6 alkylene or C1-6 heteroalkylene bridge, to the 4′ carbon of the same ribose sugar. Any suitable moiety can be used to provide such bridges, including without limitation methylene, propylene, ether, or amino bridges; O-amino (wherein amino can be, e.g., NH₂, alkylamino, dialkylamino, heterocyclyl, arylamino, diarylamino, heteroarylamino, or diheteroarylamino, ethylenediamine, or polyamino) and aminoalkoxy or O(CH₂)ₙ-amino (wherein amino can be, e.g., NH₂, alkylamino, dialkylamino, heterocyclyl, arylamino, diarylamino, heteroarylamino, or diheteroarylamino, ethylenediamine, or polyamino).

[0308] In certain embodiments, a gRNA can include a modified nucleotide which is multicyclic (e.g., tricyclo; and “unlocked” forms, such as glycol nucleic acid (GNA) (e.g., R-GNA or S-GNA, where ribose is replaced by glycol units attached to phosphodiester bonds), or threose nucleic acid (TNA, where ribose is replaced with α-L-threofuranosyl-(3′→2′)).

[0309] Generally, gRNAs include the sugar group ribose, which is a 5-membered ring having an oxygen. Exemplary modified gRNAs can include, without limitation, replacement of the oxygen in ribose (e.g., with sulfur (S), selenium (Se), or alkylene, such as, e.g., methylene or ethylene); addition of a double bond (e.g., to replace ribose with cyclopentenyl or cyclohexenyl); ring contraction of ribose (e.g., to form a 4-membered ring of cyclobutane or oxetane); ring expansion of ribose (e.g., to form a 6- or 7-membered ring having an additional carbon or heteroatom, such as for example, anhydrohexitol, altritol, mannitol, cyclohexanyl, cyclohexenyl, and morpholino that also has a phosphoramidate backbone). Although the majority of sugar analog alterations are localized to the 2′ position, other sites are amenable to modification, including the 4′ position. In certain embodiments, a gRNA comprises a 4′-S, 4′-Se or a 4′-C-aminomethyl-2′-O-Me modification.

[0310] In certain embodiments, deaza nucleotides, e.g., 7-deaza-adenosine, can be incorporated into a gRNA. In certain embodiments, 0- and N-alkylated nucleotides, e.g., N6-methyl adenosine, can be incorporated into a gRNA. In certain embodiments, one or more or all of the nucleotides in a gRNA are deoxynucleotides.

[0311] Guide RNAs can also include one or more cross-links between complementary regions of the crRNA (at its 3′ end) and the tracrRNA (at its 5′ end) (e.g., within a “tetraloop” structure and/or positioned in any stem loop structure occurring within a gRNA). A variety of linkers are suitable for use. For example, guide RNAs can include common linking moieties including, without limitation, polyvinylether, polyethylene, polypropylene, polyethylene glycol (PEG), polyvinyl alcohol (PVA), polyglycolide (PGA), polylactide (PLA), polycaprolactone (PCL), and copolymers thereof.

[0312] In some embodiments, a bifunctional cross-linker is used to link a 5′ end of a first gRNA fragment and a 3′ end of a second gRNA fragment, and the 3′ or 5′ ends of the gRNA fragments to be linked are modified with functional groups that react with the reactive groups of the cross-linker. In general, these modifications comprise one or more of amine, sulfhydryl, carboxyl, hydroxyl, alkene (e.g., a terminal alkene), azide and/or another suitable functional group. Multifunctional (e.g. bifunctional) cross-linkers are also generally known in the art, and may be either heterofunctional or homofunctional, and may include any suitable functional group, including without limitation isothiocyanate, isocyanate, acyl azide, an NHS ester, sulfonyl chloride, tosyl ester, tresyl ester, aldehyde, amine, epoxide, carbonate (e.g., Bis(p-nitrophenyl) carbonate), aryl halide, alkyl halide, imido ester, carboxylate, alkyl phosphate, anhydride, fluorophenyl ester, HOBt ester, hydroxymethyl phosphine, O-methylisourea, DSC, NHS carbamate, glutaraldehyde, activated double bond, cyclic hemiacetal, NHS carbonate, imidazole carbamate, acyl imidazole, methylpyridinium ether, azlactone, cyanate ester, cyclic imidocarbonate, chlorotriazine, dehydroazepine, 6-sulfo-cytosine derivatives, maleimide, aziridine, TNB thiol, Ellman's reagent, peroxide, vinylsulfone, phenylthioester, diazoalkanes, diazoacetyl, epoxide, diazonium, benzophenone, anthraquinone, diazo derivatives, diazirine derivatives, psoralen derivatives, alkene, phenyl boronic acid, etc. In some embodiments, a first gRNA fragment comprises a first reactive group and the second gRNA fragment comprises a second reactive group. For example, the first and second reactive groups can each comprise an amine moiety, which are crosslinked with a carbonate-containing bifunctional crosslinking reagent to form a urea linkage. In other instances, (a) the first reactive group comprises a bromoacetyl moiety and the second reactive group comprises a sulfhydryl moiety, or (b) the first reactive group comprises a sulfhydryl moiety and the second reactive group comprises a bromoacetyl moiety, which are crosslinked by reacting the bromoacetyl moiety with the sulfhydryl moiety to form a bromoacetyl-thiol linkage. These and other cross-linking chemistries are known in the art, and are summarized in the literature, including by Greg T. Hermanson, Bioconjugate Techniques, 3rd Ed. 2013, published by Academic Press.

[0313] Additional suitable gRNA modifications will be apparent to those of ordinary skill in the art based on the present disclosure. Suitable gRNA modifications include, for example, those described in PCT Publication No. WO2019070762A1 entitled “MODIFIED CPF1 GUIDE RNA;” in PCT Publication No. WO2016089433A1 entitled “GUIDE RNA WITH CHEMICAL MODIFICATIONS;” in PCT Publication No. WO2016164356A1 entitled “CHEMICALLY MODIFIED GUIDE RNAS FOR CRISPR/CAS-MEDIATED GENE REGULATION;” and in PCT Publication No. WO2017053729A1 entitled “NUCLEASE-MEDIATED GENOME EDITING OF PRIMARY CELLS AND ENRICHMENT THEREOF;” the entire contents of each of which are incorporated herein by reference.

Exemplary gRNAs

[0314] Non-limiting examples of guide RNAs suitable for certain embodiments embraced by the present disclosure are provided herein, for example, in the Tables below. Those of ordinary skill in the art will be able to envision suitable guide RNA sequences for a specific nuclease, e.g., a Cas9 or Cpf1 nuclease, from the disclosure of the targeting domain sequence, either as a DNA or RNA sequence. For example, a guide RNA comprising a targeting sequence consisting of RNA nucleotides would include the RNA sequence corresponding to the targeting domain sequence provided as a DNA sequence, and this contain uracil instead of thymidine nucleotides. For example, a guide RNA comprising a targeting domain sequence consisting of RNA nucleotides, and described by the DNA sequence TCTGCAGAAATGTTCCCCGT (SEQ ID NO: 88) would have a targeting domain of the corresponding RNA sequence UCUGCAGAAAUGUUCCCCGU (SEQ ID NO: 89). As will be apparent to the skilled artisan, such a targeting sequence would be linked to a suitable guide RNA scaffold, e.g., a crRNA scaffold sequence or a chimeric crRNA/tracrRNA scaffold sequence. Suitable gRNA scaffold sequences are known to those of ordinary skill in the art. For AsCpf1, for example, a suitable scaffold sequence comprises the sequence UAAUUUCUACUCUUGUAGAU (SEQ ID NO: 90), added to the 5′-terminus of the targeting domain. In the example above, this would result in a Cpf1 guide RNA of the sequence UAAUUUCUACUCUUGUAGAUUCUGCAGAAAUGUUCCCCGU (SEQ ID NO: 91). Those of skill in the art would further understand how to modify such a guide RNA, e.g., by adding a DNA extension (e.g., in the example above, adding a 25-mer DNA extension as described herein would result, for example, in a guide RNA of the sequence ATGTGTTTTTGTCAAAAGACCTTTTrUrArArUrUrUrCrUrArCrUrCrUrUrGrUrArGrArUrUr CrUrGrCrArGrArArArUrGrUrUrCrCrCrCrGrU (SEQ ID NO: 92)). It will be understood that the exemplary targeting sequences provided herein are not limiting, and additional suitable sequences, e.g., variants of the specific sequences disclosed herein, will be apparent to the skilled artisan based on the present disclosure in view of the general knowledge in the art.

[0315] Exemplary gRNAs are listed in the following Tables 8 to 13:

TABLE 8
AsCas12 guide RNAs

| SEQ | | Target Domain Sequence |
|---|---|---|
| ID NO | Gene | (DNA) |
| 225 | EIF4G2 | AGGCTTTGGCTGGTTCTTTAG |
| 226 | EIF4G2 | GCTGGTTCTTTAGTCAGCTTC |
| 227 | EIF4G2 | GTCAGCTTCTTCCTCTGATTC |
| 228 | EIF4G2 | TAACCAGGTTAGCCACTGATT |
| 229 | EIF4G2 | ACAAAAGACTTACCTGGAACA |
| 230 | EIF4G2 | CCGGAAACTCTTGGGTTATAT |
| 231 | EIF4G2 | CAAGCCAAGAAAGCTTCTTCT |
| 232 | EIF4G2 | CATGTCATAGAAGTGCACAAA |
| 233 | EIF4G2 | GGAAGTTGCTGTTATAGCAGT |
| 234 | EIF4G2 | TGCATTACTGGCTTGAAAGAT |
| 235 | EIF4G2 | CTGCTCTAACTGTTCTTTGGA |
| 236 | EIF4G2 | GAAGGAGCAGAGGATGAATCT |
| 237 | EIF4G2 | ATCGCTGGGGGGGTTTACTTC |
| 238 | EIF4G2 | CTTCACTAGAAATGTACTGTA |
| 239 | EIF4G2 | TCTACATGAAGTTTGGGAGAG |
| 240 | EIF4G2 | GGAGAGATGTTATCTTTAATC |
| 241 | EIF4G2 | TATATGGTTTGAGGGGATGGA |
| 242 | EIF4G2 | AGGGGATGGATCCAACTTTAT |
| 243 | EIF4G2 | TAGGTGAATCAGTGGCTAACC |
| 244 | EIF4G2 | CAAATCTTAATTTATAGGTGA |
| 245 | EIF4G2 | ATTTACAAATCTTAATTTATA |
| 246 | EIF4G2 | CGGGAAAAGGCAAGGCTTTGT |
| 247 | EIF4G2 | TTGGCTTGGAAAGAAGATATA |
| 248 | EIF4G2 | TGCACTTCTATGACATGGAAA |
| 249 | EIF4G2 | AGGCATGTTACTTCGCTTTTT |
| 250 | EIF4G2 | TTCATGATCACGTTGATCTAC |
| 251 | EIF4G2 | AAGCCAGTAATGCAGAAATTT |
| 252 | EIF4G2 | TAGTGAAGTAAACCCCCCCAG |
| 253 | EIF4G2 | TGTCCAGCTTCTTACAGTACA |
| 254 | EIF4G2 | TGAACATCITAATGACTAGGT |
| 255 | SKP1 | AAGACCTTACCTTTTTTAATA |
| 256 | SKPI | CAATGAACTTACCTTCCAACA |
| 257 | SKP1 | AGCAGGGCAGAATAAAAACCA |
| 258 | SKPI | TTCATAATTTCAGCAGGGCAG |
| 259 | SKP1 | CTTTGTTCATAATTTCAGCAG |
| 260 | SKPI | CAGGCTGCAAACTACTTAGAC |
| 261 | SKP1 | TTGTTGTAGGTCATTCAGTGG |
| 262 | SKP1 | TTAGATTTGGGAATGGATGAT |
| 263 | SKPI | TTCTGGTTTTCTTAGATTTGG |
| 264 | SKPI | GATGCCTTCAATTAAGTTGCA |
| 265 | SKP1 | ATGTCCTTTTTTTTTAGATGC |
| 266 | RPS3 | AAGCTTTATGCTGAAAAGGTG |
| 267 | RPS3 | AAGGGCCTGCTATGGTGTGCT |
| 268 | RPS3 | AAGGAAGCAAGGGATATCCTG |
| 269 | RPS3 | AGCATAAAGCTTTAAAGGAAG |
| 270 | RPS3 | CCAGACACCACAACCTCGCAG |
| 271 | RPS3 | CCAAGCACTCTCAGCTGCTCA |
| 272 | RPS19 | TTCTTCCATCTTTTCCCACAG |
| 273 | RPS19 | CCACAGGTGGCAGCTGCCAAC |
| 274 | RPS19 | TCTGACGTCCCCCATAGATCT |
| 275 | HMGB1 | AGCCCTCTTACCTTCCACCTC |
| 276 | HMGB1 | TGTTCATTTATTGAAGTTCTA |
| 277 | HMGB1 | GTTCGGCCTTCTTCCTCTTCT |
| 278 | HMGB1 | TAGACCATGTCTGCTAAAGAG |
| 279 | HMGB1 | GAAAAATAACTAAACATGGGC |
| 280 | RPL7 | CCCCAAATAGAACCTACCAAG |
| 281 | RPL7 | ACTTCAGGTACCCCAATCTGA |
| 282 | RPL7 | CTTTTTCACTTCAGGTACCCC |
| 283 | RPL7 | TGTTTGCTTTTTCACTTCAGG |
| 284 | RPL7 | ACCACAGTATCAATGGAGTGA |
| 285 | RPL7 | TGGTCCGTTTTCACCACAGTA |
| 286 | RPLP0 | AGGTCAAGGCCTTCTTGGCTG |
| 287 | RPLP0 | ACCACTTCCCCCCTCCTTTCA |
| 288 | G6PD | CTCACCTGCCATAAATATAGG |
| 289 | G6PD | CAGTATGAGGGCACCTACAAG |
| 290 | G6PD | ACCCCACTGCTGCACCAGATT |
| 291 | G6PD | CGCCACGTAGGGGTGCCCTTC |
| 292 | RPL4 | GCTTGTAGTGCCGCTGCTGCA |
| 293 | RPL4 | CCGTGGTGCTCGAAGGGCTCT |
| 294 | RPL4 | TTGCAGCACAAGCTCCGGGTG |
| 295 | RPL4 | TGCCTAATTTGTTGCAGCACA |
| 296 | RPL4 | TAGCAAGAAGATCCATCGCAG |
| 297 | RPL4 | AGTCTTCCCATGCACAAGATG |
| 298 | RPL4 | CCTTTCAGTCTTCCCATGCAC |
| 299 | EEF1G | TCCCCAGCTGAGTCCAGATTG |
| 300 | EEF1G | TTCCTCTTAGTACCTTTGTGT |
| 301 | RPL31 | GATGGCTCCCGCAAAGAAGGG |
| 302 | RPL31 | AATCGTAGGGGCTTCAAGAAG |
| 303 | RPL31 | TTAGGAATGTGCCATACCGAA |
| 304 | RPL31 | CAGATCTACAGACAGICAATG |
| 305 | RPL31 | GCACCTTATTCCTTTGGCCCA |
| 306 | RPL31 | TGGGATGGAGAACTTACTTTT |
| 307 | RPL31 | ATCTGACGATCAGCGATTAGT |
| 308 | ITM2B | ACTGTCTTTTTCATATTTTAG |
| 309 | ITM2B | ATATTTTAGGACCCAGATGAT |
| 310 | ITM2B | GGACCCAGATGATGTGGTACC |
| 311 | ITM2B | GACTAGCATTTATGCTTGCAG |
| 312 | ITM2B | TGCTTGCAGGTGTTATTCTAG |
| 313 | ITM2B | TGAATGTAGGCTGGAACCTAT |
| 314 | ITM2B | CCTCAGTCCTATCTGATTCAT |
| 315 | ITM2B | TTTATTTATCGACTGTGTCAT |
| 316 | ITM2B | TTTATCGACTGTGTCATGACA |
| 317 | ITM2B | TCGACTGTGTCATGACAAGGA |
| 318 | ITM2B | CCTCTCCAACAGGTATTCAGA |
| 319 | ITM2B | GCAATTCGGCATTTTGAAAAC |
| 320 | ITM2B | AAAACAAATTTGCCGTGGAAA |
| 321 | ITM2B | CCGTGGAAACTTTAATTTGTT |
| 322 | ITM2B | GCCAACTGGTACCACATCATC |
| 323 | ITM2B | TACAAGTATGCTCCTCCTAGA |
| 324 | ITM2B | CACTTACTTGAAGTGCAAAAT |
| 325 | ITM2B | AATGCGATCAGTAATAACCAT |
| 326 | ITM2B | CTTGTCATGACACAGTCGATA |
| 327 | ITM2B | TAAGTTTCCTTGTCATGACAC |
| 328 | ITM2B | TCTGCGTTGCAGTTTGTAAGT |
| 329 | ITM2B | ATAGTTTCTCTGCGTTGCAGT |
| 330 | ITM2B | AAAAGTATTACCTTTAATAGT |
| 331 | ITM2B | ATATTTAAAAAGTATTACCTT |
| 332 | ITM2B | AAAATGCCGAATTGCGAAACA |
| 333 | ITM2B | TTTTCAAAATGCCGAATTGCG |
| 334 | ITM2B | CACGGCAAATTTGTTTTCAAA |
| 335 | ITM2B | TTGACTGTTCAAGAACAAATT |
| 336 | RPL23A | CTTTTCTCCCAGCTCCTGCCC |
| 337 | RPL23A | TCCCAGCTCCTGCCCCTCCTA |
| 338 | RPL23A | CCTCTCCCAGGCTTGACCACT |
| 339 | RPL23A | TTTTTCAGATTGGGATCATCT |
| 340 | RPL23A | TAGGAAGGAAACTTACTTTGT |
| 341 | RPL27A | GTCTGGGCTGCCAACATGGTA |
| 342 | RPL27A | TATTCCTGCAGGCAAGCACCG |
| 343 | RPL27A | TCTGTTCTTCTAGGGCTACTA |
| 344 | PCBP2 | CCCTCTGACTCTCTCCCAGTC |
| 345 | PCBP2 | CTCCTTTTGTAGGCCTATACC |
| 346 | PCBP2 | TAGGCCTATACCATTCAAGGA |
| 347 | PCBP2 | CTCCTTGCAGTTGACCAAGCT |
| 348 | PCBP2 | ACTTGTATCTTAACAGGCATT |
| 349 | PCBP2 | GCAGGTTTGGATGCATCTGCT |
| 350 | PCBP2 | TTTCTCCCTTAAGTTGATTGG |
| 351 | PCBP2 | TCCCTTAAGTTGATTGGCTGC |
| 352 | PCBP2 | TGTGTTACAGGCTTTCCTCGG |
| 353 | PCBP2 | AGCATGAGCCTGAGGGCTTAC |
| 354 | PCBP2 | TTACCTGACCACCTGCAAAGA |
| 355 | PCBP2 | ATCATTACCCCAATAGCCTTT |
| 356 | HSPA8 | TCTTCCTCAGACTGCTGAGAA |
| 357 | HSPA8 | CTAGGCCGTTTGAGCAAGGAA |
| 358 | HSPA8 | TTTCCTAGGCCGTTTGAGCAA |
| 359 | HNRNPK | ATCAGCACTGAAACCAACCTG |
| 360 | HNRNPK | AGTTGGCTGGATCTATTATTG |
| 361 | HNRNPK | AAAAATCTTTTCAGTTGGCTG |
| 362 | HNRNPK | AATCAGATTATTCCTATGCAG |
| 363 | HNRNPK | TGTTTTTAGGGTGGCTCCGGA |
| 364 | HNRNPK | TTTCTGTTTTTAGGGTGGCTC |
| 365 | HNRNPK | TCTCTAACAGGTTGGTTTCAG |
| 366 | RPL5 | TCTCTTACTATAGATTGCTTA |
| 367 | RPL5 | CATTGGTTTCTTGAATAGCTT |
| 368 | RPL5 | TTGAATAGCTTCTCAATAGGT |
| 369 | UBL5 | TGTAGCTCCAGCTAGGATGAT |
| 370 | UBL5 | CCTTAACTGCTCTGCGCCCAG |
| 371 | UBL5 | TTAGGTACACGATTTTTAAGG |
| 372 | UBL5 | CTTCAGATGAAATCCACGATG |
| 373 | CST3 | GACAAGGTCATTGTGCCCTGC |
| 374 | CST3 | AGATGTGGCTGGTCATGGAAG |
| 375 | CST3 | TTGTACTCGCCGACGGCAAAG |
| 376 | CST3 | CAGATCTACGCTGTGCCTTGG |
| 377 | CST3 | ACAGAAAGCATTCTGCTCTTT |
| 378 | CST3 | CTTTCACAGAAAGCATTCTGC |
| 379 | CST3 | ACATGTGTAGATCGTAGCTGG |
| 380 | CST3 | CCGTCGGCGAGTACAACAAAG |
| 38 | RPS29 | TCACCAAGAGCGAGAACCCTG |
| 382 | RPS29 | TTACAGTCGTGTCTGTTCAAA |
| 383 | RPS10 | TACTGTACATGCTTCCTTTTT |
| 384 | RPS10 | CAAATGACATTATCTGAGAGC |
| 385 | RPS10 | CTCACGTGGCACAGCACTCCG |
| 386 | RPS10 | TGTGGGAACCATACCTTTAGG |
| 387 | RPS10 | TAAAAAGGAAGCATGTACAGT |
| 388 | RPSIO | TCCTATGGCAGGTCCTCATAG |
| 389 | RPS10 | TAGCTGGTGCCGACAAGAAAG |
| 390 | RPS10 | ACTTTCTAGCTGGTGCCGACA |
| 391 | RPS10 | CATAGGTCTGGAGGGTGAGCG |
| 392 | RPS10 | ATTTACATAGGTCTGGAGGGT |
| 393 | RPS10 | TGCCTTACAGTCTCTCAAGTC |
| 394 | RPL6 | TTACCAGTCACAAGTAATAAG |
| 395 | RPL6 | GAAATATGAGATTACGGAGCA |
| 396 | RPL6 | TTTAGAAATATGAGATTACGG |
| 397 | RPL6 | TCTTTATTTAGAAATATGAGA |
| 398 | RPL6 | ATTTTCTCTTTATTTAGAAAT |
| 399 | RPL6 | CCCCTTAGGACCTCTGGTCCT |
| 400 | RPL6 | ACTTACAGAGGGTGGTTTTCC |
| 401 | RPL6 | TTTTTAACTTACAGAGGGTGG |
| 402 | RPLP2 | TGTAGGTATTGGCAAGCTTGC |
| 403 | ARF1 | ACACTGGCTGCCCGGCAGGCC |
| 404 | RPL15 | TGTGTAGGTTACGTTATATAT |
| 405 | RPL15 | CTATTCTAGGAGCGAGCTGGA |
| 406 | RPL15 | CCTCTGCAACGGACTGAAGGC |
| 407 | FAU | CTGGCCGGTCACCTCGAAGGT |
| 408 | FAU | CCTGTAGGCTCATGTAGCCTC |
| 409 | FAU | CTCAGTCGCCAATATGCAGCT |
| 410 | FAU | TTTACTCAGTCGCCAATATGC |
| 411 | RPL36 | CCCCCTAGCGTCTGACCAAAC |
| 412 | RPL36 | CCCCGTACGAGCGGCGCGCCA |
| 413 | NACA | CTAGTATACCTCTTCCTCTTC |
| 414 | NACA | CTCACCTTGGCTTCCCCAAAA |
| 415 | NACA | AAATCTTACCTTCCGTGCCTT |
| 416 | NACA | TCTGTTACAGGAATTAACAAT |
| 417 | NACA | CCTCTCATCTCTCAGGTCGAT |
| 418 | NACA | TACCCTGTAGATCGAAGATTT |
| 419 | NACA | GGCTATGTCCAAACTGGGTCT |
| 420 | NACA | TCTTCTTTAGGCTATGTCCAA |
| 421 | NACA | TCTTCTTAGCTGGCGGCAGCA |
| 422 | PRDX1 | GACATCAGGCTTGATGGTATC |
| 423 | PRDX1 | CCATGCTAGATGACAGAAGTG |
| 424 | PRDX1 | TTAAATTCTTCTGCCCTATCA |
| 425 | PRDX1 | TCTTGCAGTGTGCCCAGCTGG |
| 426 | PRDX1 | TCATTGATGATAAGGGTATTC |
| 427 | PRDX1 | CCAGGGGCCTTTTTATCATTG |
| 428 | PRDX1 | ATCTCTTTTCCCAGGGGCCTT |
| 429 | PRDX1 | CTTTCATCTCTTTTCCCAGGG |
| 430 | PRDX1 | GTATCAGACCCGAAGCGCACC |
| 431 | PRDX1 | CCATAGGGTCAATACACCTAA |
| 432 | PRDX1 | CCTTTTGCCATAGGGTCAATA |
| 433 | PRDX1 | AGTGATAGGGCAGAAGAATTT |
| 434 | PRDX1 | CCCTCTTGACTTCACCTTTGT |
| 435 | PRDX1 | CCCCCAGGAAAATATGTTGTG |
| 436 | ALDOA | CCTTCTCGGTCACATACTGGC |
| 437 | NCL | GCCCAGTCCAAGGTAACTTTA |
| 438 | NCL | TTTCCATCAATTTCACCGTCT |
| 439 | NCL | CATCAATTTCACCGTCTTCCA |
| 440 | NCL | ACCGTCTTCCATGGCCTCCTT |
| 441 | NCL | GCATCCTCCTCACTGTTGAAG |
| 442 | NCL | GAGGACCCAGTTTCCCGGTCA |
| 443 | NCL | CCGGTCAGTAACTATCCTTGC |
| 444 | NCL | ATGTCTCTTCAGTGGTATCCT |
| 445 | NCL | ACAAACAGAGTTTTGGATGGC |
| 446 | NCL | GTGGCAGAGGCCGGGGAGGCT |
| 447 | NCL | GAGGACGAGGTGGTGGTAGAG |
| 448 | NCL | TAGACTTCAACAGTGAGGAGG |
| 449 | NCL | GTTTTGTAGACTTCAACAGTG |
| 450 | NCL | GTGTTCTAGGTTTGGTTTTGT |
| 451 | NCL | ATTTGGTGTTCTAGGTTTGGT |
| 452 | NCL | ACGGCTCCGTTCGGGCAAGGA |
| 453 | NCL | TCAAAGGCCTGTCTGAGGATA |
| 454 | NCL | CTTCCCAGAGCCATCCAAAAC |
| 455 | BTF3 | TAGATGAAAGAAACAATCATG |
| 456 | BTF3 | CTCTTCTCCCTGACTTTAGGG |
| 457 | BTF3 | GGGAACTGCTCGCAGAAAGAA |
| 458 | BTF3 | TTTTCTTAATAGGTGAATATG |
| 459 | BTF3 | TTAATAGGTGAATATGTTTAC |
| 460 | BTF3 | CATTTTCCTTTCATAGCTGTG |
| 461 | BTF3 | CTTTCATAGCTGTGGATGGAA |
| 462 | BTF3 | ATAGCTGTGGATGGAAAAGCA |
| 463 | BTF3 | TACTCTTTTCCTTTTCCTAGA |
| 464 | BTF3 | CTTTTCCTAGATCTTGTGGAG |
| 465 | BTF3 | CTAGATCTTGTGGAGAATTTT |
| 466 | BTF3 | ATACTTGCCTCTTCAATACCA |
| 467 | E2F4 | GGGGCTATCATTGTAGTGAGT |
| 468 | E2F4 | AGCCCATCAAGGCAGACCCCA |
| 469 | E2F4 | AGTTTTGGAACTCCCCAAAGA |
| 470 | E2F4 | GAACTCCCCAAAGAGCTGTCA |
| 471 | E2F4 | CCCCTCTGCTTCGTCTTTCTC |
| 472 | E2F4 | TCCACCCCCGGGAGACCACGA |
| 473 | E2F4 | ATGTGCCTGTTCTCAACCTCT |
| 474 | E2F4 | TGACAGCTCTTTGGGGAGTTC |
| 475 | KIF11 | ACTAAGCTTAATTGCTTTCTG |
| 476 | KIF11 | TGGAACAGGATCTGAAACTGG |
| 477 | KIF11 | TACCCATCAACACTGGTAAGA |
| 478 | KIF11 | TTCTTTTAGGATGTGGATGTA |
| 479 | KIF11 | GGATGTGGATGTAGAAGAGGC |
| 480 | KIF11 | CCGCCTTAAATCCACAGCATA |
| 481 | KIF11 | ATTAAGTTCTAGATTTTGTGC |
| 482 | KIF11 | TGGTTTCATTAAGTTCTAGAT |
| 483 | KIF11 | AGATCCTGTTCCAGAAAGCAA |
| 484 | KIF11 | AAGTACCTGTTGGGATATCCA |
| 485 | KIF11 | TCTTTTAAAGTACCTGTTGGG |
| 486 | KIF11 | AGCTGATCAAGGAGATGTTCA |
| 487 | KIF11 | CTTTTCAGCTGATCAAGGAGA |
| 488 | KIF11 | GCATCATTAACAGCTCAGGCT |
| 489 | KIF11 | TGAACAGTTTAGCATCATTAA |
| 490 | KIF11 | TTGTTTTCTGAACAGITTAGC |
| 491 | KIF11 | CCGGAATTGTCTCTTCTTTGT |
| 492 | KIF11 | AATTTACCGGAATTGTCTCTT |
| 493 | KIF11 | TCTTTTCCATGTGATTTTTTA |
| 494 | KIF11 | TTTGTCTTTTCCATGTGATTT |
| 495 | KIF11 | GACCTCTCCAGTGTGTTAATG |
| 496 | KIF11 | TTCCACTTTAGACCTCTCCAG |
| 497 | KIF11 | TAACCAAGTGCTCTGTAGTTT |
| 498 | RPL13 | TCTTCTAGGTCTATAAGAAGG |
| 499 | RPL13 | AGTAAGTGTTCACTTACGTTC |
| 500 | PFDN5 | CCTTAATTCTTGCTTCTCAGA |
| 50 | PFDN5 | AGCTGAGCAATGGACGTGGAC |
| 502 | PTMA | AAGGACTTAAAGGAGAAGAAG |
| 503 | PTMA | TGTCGAGGAGAATGAGGAAAA |
| 504 | PTMA | ATTCTCTCCAGGTGAGGAAGA |
| 505 | PTMA | TCTGCTTAGGATGACGATGTC |
| 506 | RPL11 | GCATCCGGAGAAATGAAAAGA |
| 507 | RPL11 | TCCACAGGTGCGGGAGTATGA |
| 508 | RPL11 | AGCATCGCAGACAAGAAGCGC |
| 509 | RPL11 | AGTATGATGGGATCATCCTTC |
| 510 | RPL11 | CGGATGCGAAGTTCCCGCATG |
| 511 | RPL11 | TCCGGATGCCAAAGGATCTGA |
| 512 | RPL11 | ATTTCTCCGGATGCCAAAGGA |
| 513 | RPL11 | GACCCTTCTCCAAGATTTCTT |
| 514 | RPL11 | TTAACTCATACTCCCGCACCT |
| 515 | RPL11 | CCTTCTGCTGGAACCAGCGCA |
| 516 | COX7C | TCTTTTTTTCCAACAGAATTT |
| 517 | COX7C | CAACAGAATTTGCCATTTTCA |
| 518 | RPL8 | TTGAGGCCCTCAGCACTAGTT |
| 519 | RPL8 | CGGCCAGCAGGGGCATCTCTG |
| 520 | RPL8 | TGGGTTACTTACATTCATGGC |
| 521 | RPL8 | TCTGCCTGCAGCCTGTGGAGC |
| 522 | RPL10 | TTCTCCCTACCTAGCCCTGGA |
| 523 | RPL10 | CATTGCTCCTTAGATCCACAT |
| 524 | RPL32 | CCTCCCCAAAAGGAAGAGTTC |
| 525 | TBP | CTGCGGTAATCATGAGGATAA |
| 526 | TBP | AGTTCTGGGAAAATGGTGTGC |
| 527 | TBP | CTTTCCCTAGTGAAGAACAGT |
| 528 | TBP | CCTAGTGAAGAACAGTCCAGA |
| 529 | TBP | CAGCTAAGTTCTTGGACTTCA |
| 530 | TBP | CTATAAGGTTAGAAGGCCTTG |
| 531 | TBP | CAATTTTCCTTCTAGTTATGA |
| 532 | TBP | CTTCTAGTTATGAGCCAGAGT |
| 533 | TBP | CTGGTTTAATCTACAGAATGA |
| 534 | TBP | ATCTACAGAATGATCAAACCC |
| 535 | TBP | TTTCTGGAAAAGTTGTATTAA |
| 536 | TBP | TGGAAAAGTTGTATTAACAGG |
| 537 | TBP | GGTCAAGTTTACAACCAAGAT |
| 538 | TBP | GGGCACGAAGTGCAATGGTCT |
| 539 | TBP | CCAGAACTGAAAATCAGTGCC |
| 540 | TBP | TTACGGCTACCTCTTGGCTCC |
| 541 | TBP | TTGCTGCCAGTCTGGACTGTT |
| 542 | TBP | AGACTTACCTACTAAATTGTT |
| 543 | TBP | ATCATTCTGTAGATTAAACCA |
| 544 | TBP | CAGAAACAAAAATAAGGAGAA |
| 545 | TBP | AAATGCTTCATAAATTTCTGC |
| 546 | CD63 | CTCAGCCAGCCCCCAATCTTC |
| 547 | CD63 | TCCCAATCTGTGTAGTTAGCA |
| 548 | CD63 | GGGTAATTCTCCATCTGCTGC |
| 549 | CD63 | GGAATTGTCTTTGCCTGCTGC |
| 550 | CD63 | CTTCTAGGTTTTGGGAATTGT |
| 551 | CD63 | TGCCTGCCACCTTCAGGGCTG |
| 552 | CD63 | AACGAGAAGGCGATCCATAAG |
| 553 | CD63 | AGTGCTGTGGGGCTGCTAACT |
| 554 | CD63 | TTCCCTCCCCCAGTTTAAGTG |
| 555 | CD63 | ATAACAACTTCCGGCAGCAGA |
| 556 | CD63 | TGTCTCTTATCATGTTGGTGG |
| 557 | CD63 | CCATCTTTCTGTCTCTTATCA |
| 558 | CD63 | CTCCTGCAGTTTGCCATCTTT |
| 559 | CD63 | TGGGCTGCTGCGGGGCCTGCA |
| 560 | RPS24 | TGTTTTCAGAACGACACCGTA |
| 561 | RPS24 | AGAACGACACCGTAACTATCC |
| 562 | RPS24 | GGTCATTGATGTCCTTCACCC |
| 563 | RPS24 | TCATTCAGCATGGCCTGTATG |
| 564 | RPS24 | CCTCTTCTTCTGGATTACAGA |
| 565 | RPS24 | TAGTGCGGATAGTTACGGTGT |
| 566 | RPS24 | CTTAATGAACTATACCTTTTT |
| 567 | RPS23 | GGGCTGTGCCCAAATGAGCTT |
| 568 | RPS23 | TTCCAGGAAAATGATGAAGTT |
| 569 | RPS23 | TACCCAATGACGGTTGCTTGA |
| 570 | RPS23 | AGAGGAGTTGAAGCCAAACAG |
| 571 | RPS23 | TATTTCAGAGGAGTTGAAGCC |
| 572 | RPS23 | GGCAAGTGTCGTGGACTTCGT |
| 573 | RPS23 | ATTTTTAGGCAAGTGTCGTGG |
| 574 | EEF2 | TCCAGGAAGTTGTCCAGGGCA |
| 575 | EEF2 | AGGCCCTTGCGCTTGCGGGTC |
| 576 | EEF2 | ACCACTGGCAGATCCTGCCCG |
| 577 | EEF2 | TGGTCAAGGCCTATCTGCCCG |
| 578 | EEF2 | AACAGGAAGCGGGGCCACGTG |
| 579 | EEF2 | CCTTCTGGCAGTGTCCAGAGC |
| 580 | EEF2 | TTTCCCTTCTGGCAGTGTCCA |
| 581 | CALR | CTTCTCCCTTCTGCAGGGTGA |
| 582 | CALR | GCGTGCTGGGCCTGGACCTCT |
| 583 | CALR | ACAACTTCCTCATCACCAACG |
| 584 | CALR | GCAACGAGACGTGGGGCGTAA |
| 585 | CALR | TGGGTGGATCCAAGTGCCCTT |
| 586 | CALR | CTCCAAGTCTCACCTGCCAGA |
| 587 | CALR | TTACGCCCCACGTCTCGTTGC |
| 588 | CALR | TCCTTCATTTGTTTCTCTGCT |
| 589 | CALR | TTGTCTTCTTCCTCCTCCTTA |
| 590 | CALR | TCCTCATCATCCTCCTTGTCC |
| 591 | RPL36AL | TATGCCCAGGGAAGGAGGCGC |
| 592 | SRP14 | AGGCTTATTCAAACCTCCTTA |
| 593 | SRP14 | AGGTGAGCTCCAAGGAAGTGA |
| 594 | SRP14 | CTTCTTTTTCAGGTGAGCTCC |
| 595 | SRP14 | CTTCAGATGACGGTCGAACCA |
| 596 | SRP14 | CAGAAGTGCCGGACGTCGGGC |
| 597 | SRP14 | CAGTTCCTGACGGAGCTGACC |
| 598 | GABARAP | TTTCGGATCTTCTCGCCCTCA |
| 599 | GABARAP | GGATCTTCTCGCCCTCAGAGC |
| 600 | GABARAP | TCTACATTGCCTACAGTGACG |
| 601 | GABARAP | ATCCCAGGAACACCATGAAGA |
| 602 | GABARAP | TGCTTTCATCCCAGGAACACC |
| 603 | GABARAP | TCAACAATGTCATTCCACCCA |
| 604 | GABARAP | TTTGTCAACAATGTCATTCCA |
| 605 | GABARAP | CAGTTGGTCAGTTCTACTTCT |
| 606 | GABARAP | TTGCATCTTGTATCTTTTGCA |
| 607 | GABARAP | TCAGGTGATAGTAGAAAAGGC |
| 608 | GABARAP | ATCTCTTTATCAGGTGATAGT |
| 609 | RPSA | ATAATCTGCCACTCTTGGCAG |
| 610 | RPSA | TAACCCAGATTGAAAAAGAAG |
| 611 | RPSA | GTATTCTCTTAACAGAAGACT |
| 612 | RPSA | GAGAAGCTTACCTCTTCAGGA |
| 613 | SET | AATTATTTATTACAGTATTTT |
| 614 | SET | TTACAGTATTTTGATGAAAAT |
| 615 | SET | GGATTTGACGAAACGTTCGAG |
| 616 | SET | ACGAAACGTTCGAGTCAAACG |
| 617 | SET | AGGTTCCCGATATGGATGATG |
| 618 | SET | TTTCAGGAGGATGAAGGAGAA |
| 619 | SET | AGGAGGATGAAGGAGAAGATG |
| 620 | SET | TTTTACCTCTCCTTCCTCCCC |
| 621 | SET | GCCAAATTTTCTTTTACCTCT |
| 622 | GAPDH | CAGACCACAGTCCATGCCATC |
| 623 | GAPDH | ATCTTCTAGGTATGACAACGA |
| 624 | RPLP1 | TTTGTTGTAGGAGGATAAGAT |
| 625 | RPLP1 | TTGTAGGAGGATAAGATCAAT |
| 626 | RPLP1 | TAGCTGAGGAGAAGAAAGTGG |
| 627 | RPLP1 | CCACCATCACCTTACCTTTGC |
| 628 | RPLP1 | CTACCTGGAGCAGCAGCAGTG |
| 629 | CFL1 | CTCTTAAGGGGCGCAGACTCG |
| 630 | CFL1 | TAGGGATCAAGCATGAATTGC |
| 631 | CFL1 | TTCTTTATAGGGATCAAGCAT |
| 632 | CFL1 | TGTCCAGGGCCCCCGAGTCTG |
| 633 | RPS15 | CTCTTGGTCTCCCGCAGCCCG |
| 634 | TPT1 | CATTATTTATTTTAACCCACT |
| 635 | TPT1 | TTTTAACCCACTTCCTTGTAC |
| 636 | TPT1 | ACCCACTTCCTTGTACTTACA |
| 637 | TPT1 | CCTGGTAGTTTTTGAAATTAG |
| 638 | TPT1 | GAAATGGAAAAATGTGTAAGT |
| 639 | TPT1 | CTTCCCAAGTTCTTTATTGGT |
| 640 | TPT1 | TTTGCTTCCCAAGTTCTTTAT |
| 641 | TPT1 | GAATCAAAGGGAAACTTGAAG |
| 642 | TPT1 | TTAATGCAGATGGTCAGTAGG |
| 643 | RPL23 | CTACCTTTCATCTCGCCTTTA |
| 644 | RPL23 | TTGTTCACTATGACTCCTGCA |
| 645 | RPL23 | CTCACCCTTTTTTCTGAGCTC |
| 646 | RPL23 | ATGCAGGTTCTGCCATTACAG |
| 647 | RPL23 | TTTTTTTAATGCAGGTTCTGC |
| 648 | RPL23 | TTCTCTCAGTACATCCAGCAG |
| 649 | RPL34 | ACTTTCTAGGTCCCGAACCCC |
| 650 | RPL34 | TAGGTCCCGAACCCCTGGTAA |
| 651 | RPL34 | TTATGCAGGTTCGTGCTGTAA |
| 652 | RPL34 | GTATTTTCCTTTCTAGGATCA |
| 653 | RPL34 | CTTTCTAGGATCAAGCGTGCT |
| 654 | RPL34 | TAGGATCAAGCGTGCTTTCCT |
| 655 | RPL34 | AGAAATACTTACAGCCTAGTT |
| 656 | RPL34 | ACTTACCTGTCACGAACACAT |
| 657 | RPL34 | AGCATTTAACTTACCTGTCAC |
| 658 | COX4I1 | TCTTTCAGAATGTTGGCTACC |
| 659 | COX4I1 | AGAATGTTGGCTACCAGGGTA |
| 660 | COX4I1 | CACCTCTGTGTGTGTACGAGC |
| 661 | COX4I1 | TTCAATATGTTTTTCAGAAAG |
| 662 | COX4I1 | AGAAAGTGTTGTGAAGAGCGA |
| 663 | COX4I1 | GCTCCCAGCTTATATGGATCG |
| 664 | COX4I1 | CTGAGATGAACAGGGGCTCGA |
| 665 | COX4I1 | ACCGCGCTCGTTATCATGTGG |
| 666 | COX4I1 | ACAAAGAGTGGGGGCCAAGC |
| 667 | COX4I1 | TCAAAGCTTTGCGGGAGGGGG |
| 668 | COX4I1 | GTAGTCCCACTTGGAGGCTAA |
| 669 | RPL27 | TCCTTGCTCTCTGCAGAAATG |
| 670 | RPL27 | GAACATTGATGATGGCACCTC |
| 671 | RPL27 | TCCCCAGGTACTCTGTGGATA |
| 672 | RPL27 | CCTTCTAGATACAAGACAGGC |
| 673 | RPL27 | CGTCCGGAGTAGCGTCCAGCC |
| 674 | RPL27 | TCTTTGATCTCTTGGCGATCT |
| 675 | RPL27 | ACAAAAGATTTTATCTTTGAT |
| 676 | EDF1 | GAGGCTTTGTGTTCATTTCGC |
| 677 | EDF1 | TGTTCATTTCGCCCTAGGCCC |
| 678 | EDF1 | GCCCTAGGCCCCTTCTCGATG |
| 679 | EDF1 | CAATGTCCTTTCCCCGGAGCT |
| 680 | EDF1 | CCAAGCACCTGGTTATTGGGT |
| 681 | EDF1 | TTGGAAGTCTCCACATCTTCT |
| 682 | EDF1 | GCCTGGGCGGCCGTAGGGCCC |
| 683 | EDF1 | AGGCCTCAAGCTCCGGGGAAA |
| 684 | EDF1 | GAAAATCAATGAGAAGCCACA |
| 685 | EDF1 | CCTCACACCGACTCCAGGGGC |
| 686 | EDF1 | TAGGCTATCTTAGCGGCACAG |
| 687 | EDF1 | TAATTTTCTAGGCTATCTTAG |
| 688 | TMEM59 | AAAGAAAAATGCTTAAATTTC |
| 689 | TMEM59 | AGAATGAGCAAGATTCACTTT |
| 690 | TMEM59 | TAGGTAGAGGCCCTGCTTCTT |
| 691 | TMEM59 | GATCTAACAACCACAAGAGAA |
| 692 | TMEM59 | GCTTTTGTTCATTCATAAACT |
| 693 | TMEM59 | TTCATTCATAAACTCCAAGTC |
| 694 | TMEM59 | CCTCAGAGGGAACATACTGCT |
| 695 | TMEM59 | TCCATCTTCAAGAAAATTCCT |
| 696 | TMEM59 | CTTAGAGATGATTCTCTCAAA |
| 697 | TMEM59 | TAGGCTCCTGCTCCAAATGTG |
| 698 | TMEM59 | CGTCATCGGCTTGAAGATAAA |
| 699 | TMEM59 | TGAATGAACAAAAGCTAAACA |
| 700 | TMEM59 | CAGAAGCTGAGTATCTATGGT |
| 701 | TMEM59 | TTTTGCAGAAGCTGAGTATCT |
| 702 | TMEM59 | TTGTGCAACTGTTGCTACAGC |
| 703 | TMEM59 | GATTTGTTGTGCAACTGTTGC |
| 704 | TMEM59 | ACTACAACTCTTGTCCTCTCG |
| 705 | TMEM59 | CAGTAACTCTGGGTGGATTTT |
| 706 | TMEM59 | TTGAAGATGGAGAAAGTGATG |
| 707 | TMEM59 | AGCAGATCTGCAAATGAGAAA |
| 708 | TMEM59 | AGAGAATCATCTCTAAGCAAA |
| 709 | TMEM59 | GAGCAGGAGCCTACAAATTTG |
| 710 | TMEM59 | GTCTAAGCCAGAAATCCAGTA |
| 711 | TMEM59 | ATTATTATTTTAGTCTAAGCC |
| 712 | TMEM59 | TCTTCAAGCCGATGACGGAAA |
| 713 | DYNLL1 | TCTTTTCCAGGAATTTGACAA |
| 714 | DYNLL1 | CAGGAATTTGACAAGAAGTAC |
| 715 | DYNLL1 | ATGTGTCACATAACTACCGAA |
| 716 | NME2 | TTTCTTAGGAACATCATTCAT |
| 717 | NME2 | TTAGGAACATCATTCATGGCA |
| 718 | TMBIM6 | GCTGATGGCAACACCTCATAG |
| 719 | TMBIM6 | TGTTTTCTAGGAGTTGGCCTG |
| 720 | TMBIM6 | TAGGAGTTGGCCTGGGCCCTG |
| 721 | TMBIM6 | TATTGCTGTCAACCCCAGGTA |
| 722 | TMBIM6 | TAACAGCATCCTTCCCACTGC |
| 723 | TMBIM6 | ATGGGCACGGCAATGATCTTT |
| 724 | TMBIM6 | CCTGCTTCACCCTCAGTGCAC |
| 725 | TMBIM6 | CTGTGTCTTATAGGTATCTTG |
| 726 | TMBIM6 | TCTTCCCTGGGGAATGTTTTC |
| 727 | TMBIM6 | GATCCATTTGGCTTTTCCAGG |
| 728 | TMBIM6 | TTAGGCAAACCTGTATGTGGG |
| 729 | TMBIM6 | ATACTCAACTCATTATTGAAA |
| 730 | TMBIM6 | AGGCACTGCATTGATCTCTTC |
| 731 | TMBIM6 | ATTACTGTCTTCAGAAAACTC |
| 732 | TMBIM6 | TCCATTTCTAGGATAAGAAGA |
| 733 | TMBIM6 | TAGGATAAGAAGAAAGAGAAG |
| 734 | TMBIM6 | ATGGCTATGAGGTGTTGCCAT |
| 735 | TMBIM6 | TGTTCAGTTTCATGGCTATGA |
| 736 | TMBIM6 | CCAGTTCACACTTACCTCCCA |
| 737 | TMBIM6 | AATAATGAGTTGAGTATCAAA |
| 738 | TMBIM6 | TGAAGACAGTAATGAAATCTA |
| 739 | TMBIM6 | ATTCATGGCCAGGATCATCAT |
| 740 | TMBIM6 | GGTTGTAGGCTAACTAACCTT |
| 741 | RPS7 | TTTAGGAAATTGAAGTTGGTG |
| 742 | RPS7 | GGAAATTGAAGTTGGTGGTGG |
| 743 | RPS7 | CCTTACAGAGGAGAATTCTGC |
| 744 | RPS7 | AACTATTCTTTTAGCCGTACT |
| 745 | RPS7 | GCCGTACTCTGACAGCTGTGC |
| 746 | RPS7 | TTTTCTTGTAGGTTGAAACTT |
| 747 | RPS7 | TTGTAGGTTGAAACTTTTTCT |
| 748 | RPS7 | TGAAACTACTAAAATACTCAC |
| 749 | ACTB | CTTCCCAGGGCGTGATGGTGG |
| 750 | NPM1 | ATTTGTAGTGATGATGATGAT |
| 751 | NPM1 | TAATTGCAGTCTATACGAGAT |
| 752 | NPM1 | GAAATTCATTTCTTTTTCAGG |
| 753 | NPM1 | TTTTTCAGGGACAAGAATCCT |
| 754 | NPM1 | AGGGACAAGAATCCTTCAAGA |
| 755 | NPM1 | TCTTAATAGGGTGGTTCTCTT |
| 756 | NPM1 | CAGGCTATTCAAGATCTCTGG |
| 757 | NPM1 | TAAAATCATACTTACTCTTCA |
| 758 | NPM1 | CTCACTTTTTCTATACTTGCT |
| 759 | RPS6 | TTTTTCTTGGTACGCTGCTTC |
| 760 | RPS6 | GGGCCCAGGCGGCGAGGCACT |
| 761 | RPS6 | GGAGGCTAAGGAGAAGCGCCA |
| 762 | RPS6 | TTTAGGAGGCTAAGGAGAAGC |
| 763 | RPS6 | TTTTGTTTAGGAGGCTAAGGA |
| 764 | RPS6 | GGTAAGAAACCTAGGACCAAA |
| 765 | RPS6 | AATTTTTAGGTAAGAAACCTA |
| 766 | RPS6 | TTCTAAGGAGAGAAGGATATT |
| 767 | RPL12 | CTTAAAGGAACCATTAAAGAG |
| 768 | RPL12 | TTTACTTAAAGGAACCATTAA |
| 769 | RPL12 | CTCTTCTGCAGTTAAACACAG |
| 770 | RPL12 | CTGTTTCCTCTTCTGCAGTTA |
| 771 | RPL12 | TAGTCTCCAAAAAAAGTTGGT |
| 772 | RPL12 | TTTCTAGTCTCCAAAAAAAGT |
| 773 | RPL12 | CCCCAGTATACCTGAGGTGCA |
| 774 | CAPNS1 | AACCTGTTACCCACAGACCCT |
| 775 | CAPNS1 | GCATTGACACATGTCGCAGCA |
| 776 | CAPNS1 | AGGAATTCAAGTACTTGTGGA |
| 777 | CAPNS1 | CAGTAGTGAACTCCCAGGTGC |
| 778 | CAPNS1 | ATGTTGTTCCACAAGTACTTG |
| 779 | CAPNS1 | TACACACCTGCCACCTTTTGA |
| 780 | CAPNSI | AGAGGTTTCTACACACCTGCC |
| 781 | CAPNS1 | ATCTGAGTAGCGTCGGATGAT |
| 782 | CAPNS1 | TCAAGAGATTTGAAGGCACCT |
| 783 | CAPNS1 | TCCAGTGCCATCTTTGTCAAG |
| 784 | RPL3 | CAGGGTGGCTTTGTCCACTAT |
| 785 | RPS13 | TTTATTAGCTTACCTTTCTGT |
| 786 | RPS13 | TTAGCTTACCTTTCTGTTCCT |
| 787 | RPS13 | AGTGAATCATCTACAGCCTCT |
| 788 | RPS13 | TTTTTCAGTGAATCATCTACA |
| 789 | RPS13 | CCCTTTTTTCTTTTTCAGTGA |
| 790 | RPS13 | AGGTGTAATCCTGAGAGATTC |
| 791 | RPS13 | TATTCCATAACAGTGGTTGAA |
| 792 | RPS21 | TCCACAGCTCCGCTAGCAATC |
| 793 | RPS21 | TGACCCTTCTTCTCTTTCTAG |
| 794 | RPS21 | TAGGTTGACAAGGICACAGGC |
| 795 | RPS21 | TTAAGGGTGAGTCAGATGATT |
| 796 | RPS21 | CCCTGGTTCTAGGAACTTTTG |
| 797 | RPS21 | AGACGATGCCATCGGCCTTGG |
| 798 | SERF2 | ATTTTCTTTCCTTAGGCGGTA |
| 799 | SERF2 | TTTCCTTAGGCGGTAACCAGC |
| 800 | SERF2 | CTTAGGCGGTAACCAGCGTGA |
| 801 | SERF2 | TGCTGCCGCCCGCAAGCAGAG |
| 802 | SERF2 | ATATTCTTCTGGCGGGCGAGC |
| 803 | SERF2 | CCTTAACCGAGTCGCTCTGCT |
| 804 | SERF2 | CCTCCCCTCCCTGGGGCTACC |
| 805 | RPL7A | TTTCCCCTCCTGCCTTTTAGG |
| 806 | RPL7A | CCCTCCTGCCTTTTAGGGAAG |
| 807 | RPL7A | GGGAAGACAAAGGCGCTTTGG |
| 808 | RPL7A | TCTTTTCAGATCCGCCGTCAC |
| 809 | RPL7A | AGATCCGCCGTCACTGGGGTG |
| 810 | RPL7A | GGGCCAGGCTGTGTACTTACG |
| 811 | RPL7A | GTGTAAAGCTGCCTCTTACCT |
| 812 | HNRNPA2B1 | TAAATTACCTCCACCATATGG |
| 813 | HNRNPA2B1 | CACTCTTCATTGGACCGTAGT |
| 814 | HNRNPA2B1 | CAAAATCATTGTAATTTCCAC |
| 815 | HNRNPA2B1 | TTACCTCCTCCATAGTTGTCA |
| 816 | HNRNPA2B1 | CACCGCCACCACGTGAATCCC |
| 817 | HNRNPA2B1 | GTGGTAGCAGGAACATGGGGG |
| 818 | HNRNPA2B1 | GAAATTATAACCAGCAACCTT |
| 819 | HNRNPA2B1 | ATAGGAAATTATGGAAGTGGA |
| 820 | HNRNPA2B1 | GAGGTAGCCCCGGTTATGGAG |
| 821 | HNRNPA2B1 | TAATAGGTGGCAATTTTGGAG |
| 822 | HNRNPA2B1 | GGGATGGCTATAATGGGTATG |
| 823 | HNRNPA2B1 | GCCCCTAACAGATGGATATGG |
| 824 | HNRNPA2B1 | GGACCAGGACCAGGAAGTAAC |
| 825 | HNRNPA2B1 | GGGATTCACGTGGTGGCGGTG |
| 826 | HNRNPA2B1 | GCTTTGGGGATTCACGTGGTG |
| 827 | HNRNPA2B1 | TTGTAGGCAACTTTGGCTTTG |
| 828 | HNRNPA2B1 | TCTAGACAAGAAATGCAGGAA |
| 829 | RPL13A | TCTAACAGAAAAAGCGGATGG |
| 830 | RPL13A | GCATAGCTCACCTTGTCGTAG |
| 831 | ENO1 | AGCAGGAGGCAGTTGCAGGAC |
| 832 | ENO1 | TCCTTCCCAAGAATTGAAGAG |
| 833 | ENO1 | CCTTTCTCCTTCCCAAGAATT |
| 834 | ENO1 | TCCTAGATCAAGACTGGTGCC |
| 835 | ENO1 | TTTTCTCCTAGATCAAGACTG |
| 836 | ENO1 | CTTAGTGGTGTCTATCGAAGA |
| 837 | PPIA | CTATATGTTGACAGGGTGGTG |
| 838 | PPIA | AAGGTTGGATGGCAAGCATGT |
| 839 | CD81 | CCTGTGAGGTGGCCGCCGGCA |
| 840 | CD81 | ACCACCTCAGTGCTCAAGAAC |
| 841 | CD81 | TGTCCCTCGGGCAGCAACATC |
| 842 | RPL35 | TTGACAATGCGCCCCTCAGGC |
| 843 | RPL35 | TAGCCGAGTCGTCCGGAAATC |
| 844 | DAD1 | TTCTGTGGGTTGATCTGTATT |
| 845 | DAD1 | CCAGCACCATCCTGCACCTTG |
| 846 | DAD1 | TCTTTGCCAGCACCATCCTGC |
| 847 | DAD1 | CTGATTTTCTCTTTGCCAGCA |
| 848 | DAD1 | CAAGGCATCTCCCCAGAGCGA |
| 849 | DAD1 | CCTGAGAATACAGATCAACCC |
| 850 | DAD1 | CTTCTTGTGCAGTTTGCCTGA |
| 851 | DAD1 | TGTTTTGCTTCTTGTGCAGTT |
| 852 | DAD1 | TCTCGGGCTTCATCTCTTGTG |
| 853 | DAD1 | GCGGTTCTTAGAAGAGTACTT |
| 854 | UBA52 | TGAAGACCCTCACTGGCAAAA |
| 855 | UBA52 | CCAGTGAGGGTCTTCACAAAG |
| 856 | UBA52 | TGGGCAAGCTGGCGGAGAGAA |
| 857 | UBA52 | ACCTTCTTCTTGGGACGCAGG |
| 858 | RPL30 | TAGGTGAAAAGGTTTACTTTT |
| 859 | RPL30 | TGATTTAAAAAGCATACCTGG |
| 860 | RPL30 | AAAAGCATACCTGGATCAATG |
| 861 | RPL30 | GGTGACTCTGACATCATTAGA |
| 862 | RPL30 | TTTTTTAGGTGACTCTGACAT |
| 863 | RPL30 | TTTTTATTTTTTAGGTGACTC |
| 864 | RPL30 | GTTCCCAAAGGAAATCTGAAA |
| 865 | RPL30 | CCCATTTTGGTTCCCAAAGGA |
| 866 | RPL30 | TAGAAAAAGTCGCTGGAGTCG |
| 867 | RPL30 | CTTTGTAGAAAAAGTCGCTGG |
| 868 | RPL30 | ATGTTTGCTTTGTAGAAAAAG |
| 869 | RNASEK | CGCCTGCCGCCCCCGGATGGG |
| 870 | RNASEK | TCCCACCGCTTTCCGAGCCCG |
| 871 | RNASEK | CGAGCCCGCTTGCACCTCGGC |
| 872 | RNASEK | TGGCGTCGCTCCTGTGCTGTG |
| 873 | RPL38 | TGTTGCAGCCTCGGAAAATTG |
| 874 | RPL38 | TCTCTTTCCCTCTAGGTTTGG |
| 875 | RPL38 | CCTCTAGGTTTGGCAGTGAAG |
| 876 | RPL38 | GTCGGGCTGTGAGCAGGAAGT |
| 877 | MYL12B | TTCTTTCTATTGTCTTCCAGG |
| 878 | MYL12B | TATTGTCTTCCAGGCACCATT |
| 879 | MYL12B | GCTAAAGTTCTTTCAGTCATC |
| 880 | PFN1 | CCCATCAGCAGGACTAGCGCT |
| 881 | PFN1 | CTCCTCCTCCAGCGCTAGTCC |
| 882 | PFN1 | TCTTTCCTCCTCCTCCAGCGC |
| 883 | PFN1 | GCATGGATCTTCGTACCAAGA |
| 884 | RPS11 | TCCTCATAATCTGTAGACTGA |
| 885 | RPS11 | TCTTTCCTATCCTTTCAGGCT |
| 886 | RPS11 | CTATCCTTTCAGGCTATTGAG |
| 887 | RPS11 | AGGCTATTGAGGGCACCTACA |
| 888 | RPS11 | TTCTGAGGTTCCCCGCACCTC |

TABLE 9
Cas12b guide RNAs

| SEQ | | | SEQ | | |
|---|---|---|---|---|---|
| ID NO | Gene | Target Domain Sequence (DNA) | ID NO | Gene | Target Domain Sequence (DNA) |
| 889 | GAPDH | CCCAGCTCTCATACCATGAGTCC | 917 | E2F4 | CCAGAGTGCATGAGCTCGGAGCT |
| 890 | TBP | TATCCACAGTGAATCTTGGTTGT | 918 | E2F4 | TATCTACAACCTGGACGAGAGTG |
| 891 | TBP | CACTTCGTGCCCGAAACGCCGAA | 919 | E2F4 | CCTGGACTTCTGCACTGCCAGGG |
| 892 | TBP | TCTCTGACCATTGTAGCGGTTTG | 920 | E2F4 | CTGACAGCTCTTTGGGGAGTTCC |
| 893 | TBP | TAGCGGTTTGCTGCGGTAATCAT | 921 | G6PD | AGCTGGAGAAGCCCAAGCCCATC |
| 894 | TBP | TCAGTTCTGGGAAAATGGTGTGC | 922 | G6PD | TCACCCCACTGCTGCACCAGATT |
| 895 | TBP | AGAATATGGTGGGGAGCTGTGAT | 923 | KIF11 | ATGAAGATAAATTGATAGCACAA |
| 896 | TBP | TCCTTCTAGTTATGAGCCAGAGT | 924 | KIF11 | ATAGCACAAAATCTAGAACTTAA |
| 897 | TBP | CCTGGTTTAATCTACAGAATGAT | 925 | KIF11 | GTTTGACTAAGCTTAATTGCTTT |
| 898 | TBP | TTCTCCTTATTTTTGTTTCTGGA | 926 | KIF11 | CTTTCTGGAACAGGATCTGAAAC |
| 899 | TBP | TTGTTTCTGGAAAAGTTGTATTA | 927 | KIF11 | ATACCCATCAACACTGGTAAGAA |
| 900 | TBP | ATGAAGCATTTGAAAACATCTAC | 928 | KIF11 | TTCATCAATTGGCGGGGTTCCAT |
| 901 | TBP | TAAAGGGATTCAGGAAGACGACG | 929 | KIF11 | GCGGGGTTCCATTTTTCCAGGTA |
| 902 | TBP | GGCGTTTCGGGCACGAAGTGCAA | 930 | KIF11 | TCCCGCCTTAAATCCACAGCATA |
| 903 | TBP | TATTCGGCGTTTCGGGCACGAAG | 931 | KIF11 | ACACACTGGAGAGGTCTAAAGTG |
| 904 | TBP | AAATAGATCTAACCTTGGGATTA | 932 | KIF11 | CCTCTGCGAGCCCAGATCAACCT |
| 905 | TBP | TCCCAGAACTGAAAATCAGTGCC | 933 | KIF11 | AGTTCTAGATTTTGTGCTATCAA |
| 906 | TBP | CTTACGGCTACCTCTTGGCTCCT | 934 | KIF11 | TTATGGTTTCATTAAGTTCTAGA |
| 907 | TBP | TCTTGCTGCCAGTCTGGACTGTT | 935 | KIF11 | AGCTTAGTCAAACCAATTTTTAT |
| 908 | TBP | TGAATCTTGAAGTCCAAGAACTT | 936 | KIF11 | CTCTTTTAAAGTACCTGTTGGGA |
| 909 | TBP | TTGGTGGGTGAGCACAAGGCCTT | 937 | KIF11 | TATTTCTCTTTTAAAGTACCTGT |
| 910 | TBP | CAGACTTACCTACTAAATTGTTG | 938 | KIF11 | ACAGCTCAGGCTGTTTCCTTTTC |
| 911 | TBP | AACCAGGAAATAACTCTGGCTCA | 939 | KIF11 | TCTCTTCTTTGTTGTTTTCTGAA |
| 912 | TBP | TGTAGATTAAACCAGGAAATAAC | 940 | KIF11 | ACCGGAATTGTCTCTTCTTTGTT |
| 913 | TBP | TGGGTTTGATCATTCTGTAGATT | 941 | KIF11 | ATGAACAATCCACACCAGCATCT |
| 914 | TBP | CTGCTCTGACTTTAGCACCTAAG | 942 | KIF11 | AAGGTTGATCTGGGCTCGCAGAG |
| 915 | TBP | CGTCGTCTTCCTGAATCCCTTTA | 943 | KIF11 | CCAACCCCCAAGTGAATTAAAGG |
| 916 | E2F4 | TAGTGAGTGGCGGCCCTGGGACT | — | | |

TABLE 10
Cas12e guide RNAs

| SEQ | | | SEQ | | |
|---|---|---|---|---|---|
| ID NO | Gene | Target Domain Sequence (DNA) | ID NO | Gene | Target Domain Sequence (DNA) |
| 944 | GAPDH | TCTTCTAGGTATGACAACGAA | 993 | E2F4 | CTGGACTTCTGCACTGCCAGG |
| 945 | GAPDH | CCAGCTCTCATACCATGAGTC | 994 | E2F4 | GACAGCTCTTTGGGGAGTTCC |
| 946 | TBP | TGCCCGAAACGCCGAATATAA | 995 | E2F4 | GAGGACATCAACTCCTCCAGC |
| 947 | TBP | CTCTGACCATTGTAGCGGTTT | 996 | E2F4 | AGGGCCACCCACCTTCTGAGG |
| 948 | TBP | GTTCTGGGAAAATGGTGTGCA | 997 | E2F4 | CTCTCGTCCAGGTTGTAGATA |
| 949 | TBP | GGGAAAATGGTGTGCACAGGA | 998 | G6PD | CCCACTTGTAGGTGCCCTCAT |
| 950 | TBP | TTTCCCTAGTGAAGAACAGTC | 999 | G6PD | TCAGCTCGTCTGCCTCCGTGG |
| 951 | TBP | CTAGTGAAGAACAGTCCAGAC | 1000 | G6PD | TCACCTGCCATAAATATAGGG |
| 952 | TBP | AGCTAAGTTCTTGGACTTCAA | 1001 | G6PD | CCAGCTCAATCTGGTGCAGCA |
| 953 | TBP | TGGACTTCAAGATTCAGAATA | 1002 | G6PD | CTGTAGGGCACCTTGTATCTG |
| 954 | TBP | AGATTCAGAATATGGTGGGGA | 1003 | G6PD | TGGTCATCATCTTGGTGTACA |
| 955 | TBP | GAATATGGTGGGGAGCTGTGA | 1004 | G6PD | GGGCCTTGCCGCAGCGCAGGA |
| 956 | TBP | TATAAGGTTAGAAGGCCTTGT | 1005 | G6PD | AGTATGAGGGCACCTACAAGT |
| 957 | TBP | TTCTAGTTATGAGCCAGAGTT | 1006 | G6PD | CCCCACTGCTGCACCAGATTG |
| 958 | TBP | AGTTATGAGCCAGAGTTATTT | 1007 | G6PD | GCGGGAGCCAGATGCACTTCG |
| 959 | TBP | TGGTTTAATCTACAGAATGAT | 1008 | G6PD | ACCCCGAGGAGTCGGAGCTGG |
| 960 | TBP | CCTTATTTTTGTTTCTGGAAA | 1009 | G6PD | TCAACCCCGAGGAGTCGGAGC |
| 961 | TBP | GGAAAAGTTGTATTAACAGGT | 1010 | G6PD | ACCAGCAGTGCAAGCGCAACG |
| 962 | TBP | TAGGTGCTAAAGTCAGAGCAG | 1011 | G6PD | ATGATGTGGCCGGCGACATCT |
| 963 | TBP | AAAGGGATTCAGGAAGACGAC | 1012 | G6PD | TCCTGCGCTGCGGCAAGGCCC |
| 964 | TBP | GGCACGAAGTGCAATGGTCTT | 1013 | G6PD | GCCACGTAGGGGTGCCCTTCA |
| 965 | TBP | GCGTTTCGGGCACGAAGTGCA | 1014 | KIF11 | GGAACAGGATCTGAAACTGGA |
| 966 | TBP | TGGCTCTCTTATCCTCATGAT | 1015 | KIF11 | GAAAACAACAAAGAAGAGACA |
| 967 | TBP | CAGAACTGAAAATCAGTGCCG | 1016 | KIF11 | TCTTTTAGGATGTGGATGTAG |
| 968 | TBP | TACGGCTACCTCTTGGCTCCT | 1017 | KIF11 | TTTAGGATGTGGATGTAGAAG |
| 969 | TBP | TGCTGCCAGTCTGGACTGTTC | 1018 | KIF11 | GGGGCAGTATACTGAAGAACC |
| 970 | TBP | GTACAACTCTAGCATATTTTC | 1019 | KIF11 | TCAATTGGCGGGGTTCCATTT |
| 971 | TBP | GAATCTTGAAGTCCAAGAACT | 1020 | KIF11 | CGCCTTAAATCCACAGCATAA |
| 972 | TBP | CATCACAGCTCCCCACCATAT | 1021 | KIF11 | AGATTTTGTGCTATCAATTTA |
| 973 | TBP | AACCTTATAGGAAACTTCACA | 1022 | KIF11 | TTAAGTTCTAGATTTTGTGCT |
| 974 | TBP | GACTTACCTACTAAATTGTTG | 1023 | KIF11 | AGAAAGCAATTAAGCTTAGTC |
| 975 | TBP | GTAGATTAAACCAGGAAATAA | 1024 | KIF11 | GATCCTGTTCCAGAAAGCAAT |
| 976 | TBP | GGGTTTGATCATTCTGTAGAT | 1025 | KIF11 | CTTTTAAAGTACCTGTTGGGA |
| 977 | TBP | AGAAACAAAAATAAGGAGAAC | 1026 | KIF11 | ATTTCTCTTTTAAAGTACCTG |
| 978 | TBP | TGTTACAACTTACCTGTTAAT | 1027 | KIF11 | TCTGTGGTGTCGTACCTTTAA |
| 979 | TBP | GCTCTGACTTTAGCACCTAAG | 1028 | KIF11 | TACCAGTGTTGATGGGTATAA |
| 980 | TBP | TAAATTTCTGCTCTGACTTTA | 1029 | KIF11 | GTTCTTACCAGTGTTGATGGG |
| 981 | TBP | AATGCTTCATAAATTTCTGCT | 1030 | KIF11 | CGTGGTTCAGTTCTTACCAGT |
| 982 | TBP | TGAATCCCTTTAGAATAGGGT | 1031 | KIF11 | GCTGATCAAGGAGATGTTCAC |
| 983 | E2F4 | CTCCCACTGGGCCCAACAACA | 1032 | KIF11 | TTTTCAGCTGATCAAGGAGAT |
| 984 | E2F4 | GCCCTGCTGGACAGCAGCAGC | 1033 | KIF11 | GAACAGTTTAGCATCATTAAC |
| 985 | E2F4 | TCCGGACCCAACCCTTCTACC | 1034 | KIF11 | TTGTTGTTTTCTGAACAGTTT |
| 986 | E2F4 | ACCTCCTTTGAGCCCATCAAG | 1035 | KIF11 | GTATACTGCCCCAGAACTGCC |
| 987 | E2F4 | TGTTTTTCAGTTTTGGAACTC | 1036 | KIF11 | TCAGTATACTGCCCCAGAACT |
| 988 | E2F4 | GTTTTGGAACTCCCCAAAGAG | 1037 | KIF11 | ATGTGATTTTTTATGCTGTGG |
| 989 | E2F4 | CAGAGTGCATGAGCTCGGAGC | 1038 | KIF11 | TTGTCTTTTCCATGTGATTTT |
| 990 | E2F4 | TCTTTCTCCACCCCCGGGAGA | 1039 | KIF11 | ACTTTAGACCTCTCCAGTGTG |
| 991 | E2F4 | CCACCCCCGGGAGACCACGAT | 1040 | KIF11 | TCCACTTTAGACCTCTCCAGT |
| 992 | E2F4 | GCACTGCCAGGGACAGCAGTG | | | |

TABLE 11
Cas-Phi guide RNAs

| SEQ | | | SEQ | | |
|---|---|---|---|---|---|
| ID NO | Gene | Target Domain Sequence (DNA) | ID NO | Gene | Target Domain Sequence (DNA) |
| 1041 | GAPDH | TGCAGACCACAGTCCATGCCA | 1192 | E2F4 | ATGGGCTCAAAGGAGGTAGAA |
| 1042 | GAPDH | GCAGACCACAGTCCATGCCAT | 1193 | E2F4 | TGACAGCTCTTTGGGGAGTTC |
| 1043 | GAPDH | CAGACCACAGTCCATGCCATC | 1194 | E2F4 | CTGACAGCTCTTTGGGGAGTT |
| 1044 | GAPDH | TCATCTTCTAGGTATGACAAC | 1195 | E2F4 | TGAGGACATCAACTCCTCCAG |
| 1045 | GAPDH | CATCTTCTAGGTATGACAACG | 1196 | E2F4 | CAGGGCCACCCACCTTCTGAG |
| 1046 | GAPDH | ATCTTCTAGGTATGACAACGA | 1197 | E2F4 | TAGATATAATCGTGGTCTCCC |
| 1047 | GAPDH | TAGGTATGACAACGAATTTGG | 1198 | E2F4 | ACTCTCGTCCAGGTTGTAGAT |
| 1048 | GAPDH | CCCAGCTCTCATACCATGAGT | 1199 | G6PD | TGGGGGTTCACCCACTTGTAG |
| 1049 | TBP | TATCCACAGTGAATCTTGGTT | 1200 | G6PD | ACCCACTTGTAGGTGCCCTCA |
| 1050 | TBP | GTTGTAAACTTGACCTAAAGA | 1201 | G6PD | TAGGTGCCCTCATACTGGAAA |
| 1051 | TBP | TAAACTTGACCTAAAGACCAT | 1202 | G6PD | ATCAGCTCGTCTGCCTCCGTG |
| 1052 | TBP | ACCTAAAGACCATTGCACTTC | 1203 | G6PD | CCTCACCTGCCATAAATATAG |
| 1053 | TBP | CACTTCGTGCCCGAAACGCCG | 1204 | G6PD | CTCACCTGCCATAAATATAGG |
| 1054 | TBP | GTGCCCGAAACGCCGAATATA | 1205 | G6PD | GGCTTCTCCAGCTCAATCTGG |
| 1055 | TBP | TCTCTGACCATTGTAGCGGTT | 1206 | G6PD | TCCAGCTCAATCTGGTGCAGC |
| 1056 | TBP | TAGCGGTTTGCTGCGGTAATC | 1207 | G6PD | TCTGTAGGGCACCTTGTATCT |
| 1057 | TBP | GCTGCGGTAATCATGAGGATA | 1208 | G6PD | TATCTGTTGCCGTAGGTCAGG |
| 1058 | TBP | CTGCGGTAATCATGAGGATAA | 1209 | G6PD | CCGTAGGTCAGGTCCAGCTCC |
| 1059 | TBP | TCAGTTCTGGGAAAATGGTGT | 1210 | G6PD | AAGAACATGCCCGGCTTCTTG |
| 1060 | TBP | CAGTTCTGGGAAAATGGTGTG | 1211 | G6PD | TTGGTCATCATCTTGGTGTAC |
| 1061 | TBP | AGTTCTGGGAAAATGGTGTGC | 1212 | G6PD | GTCATCATCTTGGTGTACACG |
| 1062 | TBP | TGGGAAAATGGTGTGCACAGG | 1213 | G6PD | GTGTACACGGCCTCGTTGGGC |
| 1063 | TBP | TTTCCTTTCCCTAGTGAAGAA | 1214 | G6PD | GGCTGCACGCGGATCACCAGC |
| 1064 | TBP | TTCCTTTCCCTAGTGAAGAAC | 1215 | G6PD | CGCTTGCACTGCTGGTGGAAG |
| 1065 | TBP | TCCTTTCCCTAGTGAAGAACA | 1216 | G6PD | CACTGCTGGTGGAAGATGTCG |
| 1066 | TBP | CCTTTCCCTAGTGAAGAACAG | 1217 | G6PD | CGCTCGTTCAGGGCCTTGCCG |
| 1067 | TBP | CTTTCCCTAGTGAAGAACAGT | 1218 | G6PD | AGGGCCTTGCCGCAGCGCAGG |
| 1068 | TBP | CCCTAGTGAAGAACAGTCCAG | 1219 | G6PD | CCGCAGCGCAGGATGAAGGGC |
| 1069 | TBP | CCTAGTGAAGAACAGTCCAGA | 1220 | G6PD | CAGTATGAGGGCACCTACAAG |
| 1070 | TBP | TACAGAAGTTGGGTTTTCCAG | 1221 | G6PD | CCAGTATGAGGGCACCTACAA |
| 1071 | TBP | GGTTTTCCAGCTAAGTTCTTG | 1222 | G6PD | AGCTGGAGAAGCCCAAGCCCA |
| 1072 | TBP | TCCAGCTAAGTTCTTGGACTT | 1223 | G6PD | ACCCCACTGCTGCACCAGATT |
| 1073 | TBP | CCAGCTAAGTTCTTGGACTTC | 1224 | G6PD | CACCCCACTGCTGCACCAGAT |
| 1074 | TBP | CAGCTAAGTTCTTGGACTTCA | 1225 | G6PD | TCACCCCACTGCTGCACCAGA |
| 1075 | TBP | TTGGACTTCAAGATTCAGAAT | 1226 | G6PD | TGCGGGAGCCAGATGCACTTC |
| 1076 | TBP | GACTTCAAGATTCAGAATATG | 1227 | G6PD | AACCCCGAGGAGTCGGAGCTG |
| 1077 | TBP | AAGATTCAGAATATGGTGGGG | 1228 | G6PD | TTCAACCCCGAGGAGTCGGAG |
| 1078 | TBP | AGAATATGGTGGGGAGCTGTG | 1229 | G6PD | CACCAGCAGTGCAAGCGCAAC |
| 1079 | TBP | CCTATAAGGTTAGAAGGCCTT | 1230 | G6PD | CATGATGTGGCCGGCGACATC |
| 1080 | TBP | CTATAAGGTTAGAAGGCCTTG | 1231 | G6PD | ATCCTGCGCTGCGGCAAGGCC |
| 1081 | TBP | TGCTCACCCACCAACAATTTA | 1232 | G6PD | CGCCACGTAGGGGTGCCCTTC |
| 1082 | TBP | TTGCAATTTTCCTTCTAGTTA | 1233 | G6PD | CCGCCACGTAGGGGTGCCCTT |
| 1083 | TBP | TGCAATTTTCCTTCTAGTTAT | 1234 | KIF11 | ATGAAGATAAATTGATAGCAC |
| 1084 | TBP | GCAATTTTCCTTCTAGTTATG | 1235 | KIF11 | ATAGCACAAAATCTAGAACTT |
| 1085 | TBP | CAATTTTCCTTCTAGTTATGA | 1236 | KIF11 | ATGAAACCATAAAAATTGGTT |
| 1086 | TBP | TCCTTCTAGTTATGAGCCAGA | 1237 | KIF11 | GTTTGACTAAGCTTAATTGCT |
| 1087 | TBP | CCTTCTAGTTATGAGCCAGAG | 1238 | KIF11 | GACTAAGCTTAATTGCTTTCT |
| 1088 | TBP | CTTCTAGTTATGAGCCAGAGT | 1239 | KIF11 | ACTAAGCTTAATTGCTTTCTG |
| 1089 | TBP | TAGTTATGAGCCAGAGTTATT | 1240 | KIF11 | ATTGCTTTCTGGAACAGGATC |
| 1090 | TBP | TGAGCCAGAGTTATTTCCTGG | 1241 | KIF11 | CTTTCTGGAACAGGATCTGAA |
| 1091 | TBP | CCTGGTTTAATCTACAGAATG | 1242 | KIF11 | CTGGAACAGGATCTGAAACTG |
| 1092 | TBP | CTGGTTTAATCTACAGAATGA | 1243 | KIF11 | TGGAACAGGATCTGAAACTGG |
| 1093 | TBP | AATCTACAGAATGATCAAACC | 1244 | KIF11 | TCTAATGTCCGTTAAAGGTAC |
| 1094 | TBP | ATCTACAGAATGATCAAACCC | 1245 | KIF11 | AAGGTACGACACCACAGAGGA |
| 1095 | TBP | TTCTCCTTATTTTTGTTTCTG | 1246 | KIF11 | TTTATACCCATCAACACTGGT |
| 1096 | TBP | TCCTTATTTTTGTTTCTGGAA | 1247 | KIF11 | ATACCCATCAACACTGGTAAG |
| 1097 | TBP | TTTTTGTTTCTGGAAAAGTTG | 1248 | KIF11 | TACCCATCAACACTGGTAAGA |
| 1098 | TBP | TTGTTTCTGGAAAAGTTGTAT | 1249 | KIF11 | ATCAGCTGAAAAGGAAACAGC |
| 1099 | TBP | TGTTTCTGGAAAAGTTGTATT | 1250 | KIF11 | ATGATGCTAAACTGTTCAGAA |
| 1100 | TBP | GTTTCTGGAAAAGTTGTATTA | 1251 | KIF11 | AGAAAACAACAAAGAAGAGAC |
| 1101 | TBP | TTTCTGGAAAAGTTGTATTAA | 1252 | KIF11 | CTTCTTTTAGGATGTGGATGT |
| 1102 | TBP | CTGGAAAAGTTGTATTAACAG | 1253 | KIF11 | TTCTTTTAGGATGTGGATGTA |
| 1103 | TBP | TGGAAAAGTTGTATTAACAGG | 1254 | KIF11 | TTTTAGGATGTGGATGTAGAA |
| 1104 | TBP | TCTTCTTAGGTGCTAAAGTCA | 1255 | KIF11 | TAGGATGTGGATGTAGAAGAG |
| 1105 | TBP | TTAGGTGCTAAAGTCAGAGCA | 1256 | KIF11 | AGGATGTGGATGTAGAAGAGG |
| 1106 | TBP | GGTGCTAAAGTCAGAGCAGAA | 1257 | KIF11 | GGATGTGGATGTAGAAGAGGC |
| 1107 | TBP | TAAAGGGATTCAGGAAGACGA | 1258 | KIF11 | TGGGGCAGTATACTGAAGAAC |
| 1108 | TBP | GGTCAAGTTTACAACCAAGAT | 1259 | KIF11 | TTCATCAATTGGCGGGGTTCC |
| 1109 | TBP | AGGTCAAGTTTACAACCAAGA | 1260 | KIF11 | ATCAATTGGCGGGGTTCCATT |
| 1110 | TBP | GGGCACGAAGTGCAATGGTCT | 1261 | KIF11 | GCGGGGTTCCATTTTTCCAGG |
| 1111 | TBP | CGGGCACGAAGTGCAATGGTC | 1262 | KIF11 | TCCCGCCTTAAATCCACAGCA |
| 1112 | TBP | GGCGTTTCGGGCACGAAGTGC | 1263 | KIF11 | CCCGCCTTAAATCCACAGCAT |
| 1113 | TBP | TATTCGGCGTTTCGGGCACGA | 1264 | KIF11 | CCGCCTTAAATCCACAGCATA |
| 1114 | TBP | GGATTATATTCGGCGTTTCGG | 1265 | KIF11 | AATCCACAGCATAAAAAATCA |
| 1115 | TBP | AAATAGATCTAACCTTGGGAT | 1266 | KIF11 | ACACACTGGAGAGGTCTAAAG |
| 1116 | TBP | TCCTCATGATTACCGCAGCAA | 1267 | KIF11 | GTTACAAAGAGCAGATTACCT |
| 1117 | TBP | GTGGCTCTCTTATCCTCATGA | 1268 | KIF11 | CAAAGAGCAGATTACCTCTGC |
| 1118 | TBP | CCAGAACTGAAAATCAGTGCC | 1269 | KIF11 | CCTCTGCGAGCCCAGATCAAC |
| 1119 | TBP | CCCAGAACTGAAAATCAGTGC | 1270 | KIF11 | TAGATTTTGTGCTATCAATTT |
| 1120 | TBP | TCCCAGAACTGAAAATCAGTG | 1271 | KIF11 | AGTTCTAGATTTTGTGCTATC |
| 1121 | TBP | GCTCCTGTGCACACCATTTTC | 1272 | KIF11 | ATTAAGTTCTAGATTTTGTGC |
| 1122 | TBP | CGGCTACCTCTTGGCTCCTGT | 1273 | KIF11 | CATTAAGTTCTAGATTTTGTG |
| 1123 | TBP | TTACGGCTACCTCTTGGCTCC | 1274 | KIF11 | TGGTTTCATTAAGTTCTAGAT |
| 1124 | TBP | CTTACGGCTACCTCTTGGCTC | 1275 | KIF11 | ATGGTTTCATTAAGTTCTAGA |
| 1125 | TBP | CTGCCAGTCTGGACTGTTCTT | 1276 | KIF11 | TATGGTTTCATTAAGTTCTAG |
| 1126 | TBP | TTGCTGCCAGTCTGGACTGTT | 1277 | KIF11 | TTATGGTTTCATTAAGTTCTA |
| 1127 | TBP | CTTGCTGCCAGTCTGGACTGT | 1278 | KIF11 | GTCAAACCAATTTTTATGGTT |
| 1128 | TBP | TCTTGCTGCCAGTCTGGACTG | 1279 | KIF11 | AGCTTAGTCAAACCAATTTTT |
| 1129 | TBP | TGTACAACTCTAGCATATTTT | 1280 | KIF11 | CAGAAAGCAATTAAGCTTAGT |
| 1130 | TBP | GCTGGAAAACCCAACTTCTGT | 1281 | KIF11 | AGATCCTGTTCCAGAAAGCAA |
| 1131 | TBP | AAGTCCAAGAACTTAGCTGGA | 1282 | KIF11 | CAGATCCTGTTCCAGAAAGCA |
| 1132 | TBP | TGAATCTTGAAGTCCAAGAAC | 1283 | KIF11 | GGATATCCAGTTTCAGATCCT |
| 1133 | TBP | ACATCACAGCTCCCCACCATA | 1284 | KIF11 | AAGTACCTGTTGGGATATCCA |
| 1134 | TBP | TAACCTTATAGGAAACTTCAC | 1285 | KIF11 | AAAGTACCTGTTGGGATATCC |
| 1135 | TBP | GTGGGTGAGCACAAGGCCTTC | 1286 | KIF11 | TAAAGTACCTGTTGGGATATC |
| 1136 | TBP | TTGGTGGGTGAGCACAAGGCC | 1287 | KIF11 | TCTTTTAAAGTACCTGTTGGG |
| 1137 | TBP | CCTACTAAATTGTTGGTGGGT | 1288 | KIF11 | CTCTTTTAAAGTACCTGTTGG |
| 1138 | TBP | AGACTTACCTACTAAATTGTT | 1289 | KIF11 | TATTTCTCTTTTAAAGTACCT |
| 1139 | TBP | CAGACTTACCTACTAAATTGT | 1290 | KIF11 | CTCTGTGGTGTCGTACCTTTA |
| 1140 | TBP | AACCAGGAAATAACTCTGGCT | 1291 | KIF11 | CCTCTGTGGTGTCGTACCTTT |
| 1141 | TBP | TGTAGATTAAACCAGGAAATA | 1292 | KIF11 | TCCTCTGTGGTGTCGTACCTT |
| 1142 | TBP | ATCATTCTGTAGATTAAACCA | 1293 | KIF11 | ATGGGTATAAATAACTTTTCC |
| 1143 | TBP | GATCATTCTGTAGATTAAACC | 1294 | KIF11 | CCAGTGTTGATGGGTATAAAT |
| 1144 | TBP | TGGGTTTGATCATTCTGTAGA | 1295 | KIF11 | TTACCAGTGTTGATGGGTATA |
| 1145 | TBP | CAGAAACAAAAATAAGGAGAA | 1296 | KIF11 | AGTTCTTACCAGTGTTGATGG |
| 1146 | TBP | CCAGAAACAAAAATAAGGAGA | 1297 | KIF11 | ACGTGGTTCAGTTCTTACCAG |
| 1147 | TBP | TCCAGAAACAAAAATAAGGAG | 1298 | KIF11 | AGCTGATCAAGGAGATGTTCA |
| 1148 | TBP | ATACAACTTTTCCAGAAACAA | 1299 | KIF11 | CAGCTGATCAAGGAGATGTTC |
| 1149 | TBP | CCTGTTAATACAACTTTTCCA | 1300 | KIF11 | TCAGCTGATCAAGGAGATGTT |
| 1150 | TBP | CAACTTACCTGTTAATACAAC | 1301 | KIF11 | CTTTTCAGCTGATCAAGGAGA |
| 1151 | TBP | CTGTTACAACTTACCTGTTAA | 1302 | KIF11 | CCTTTTCAGCTGATCAAGGAG |
| 1152 | TBP | TGCTCTGACTTTAGCACCTAA | 1303 | KIF11 | ACAGCTCAGGCTGTTTCCTTT |
| 1153 | TBP | CTGCTCTGACTTTAGCACCTA | 1304 | KIF11 | GCATCATTAACAGCTCAGGCT |
| 1154 | TBP | ATAAATTTCTGCTCTGACTTT | 1305 | KIF11 | AGCATCATTAACAGCTCAGGC |
| 1155 | TBP | AAATGCTTCATAAATTTCTGC | 1306 | KIF11 | TGAACAGTTTAGCATCATTAA |
| 1156 | TBP | CAAATGCTTCATAAATTTCTG | 1307 | KIF11 | CTGAACAGTTTAGCATCATTA |
| 1157 | TBP | TCAAATGCTTCATAAATTTCT | 1308 | KIF11 | TCTGAACAGTTTAGCATCATT |
| 1158 | TBP | CTGAATCCCTTTAGAATAGGG | 1309 | KIF11 | TTTTCTGAACAGTTTAGCATC |
| 1159 | TBP | CGTCGTCTTCCTGAATCCCTT | 1310 | KIF11 | TTGTTTTCTGAACAGTTTAGC |
| 1160 | E2F4 | GGGGGCTATCATTGTAGTGAG | 1311 | KIF11 | TTTGTTGTTTTCTGAACAGTT |
| 1161 | E2F4 | GGGGCTATCATTGTAGTGAGT | 1312 | KIF11 | TCTCTTCTTTGTTGTTTTCTG |
| 1162 | E2F4 | TAGTGAGTGGCGGCCCTGGGA | 1313 | KIF11 | CCGGAATTGTCTCTTCTTTGT |
| 1163 | E2F4 | ACTCCCACTGGGCCCAACAAC | 1314 | KIF11 | ACCGGAATTGTCTCTTCTTTG |
| 1164 | E2F4 | TGCCCTGCTGGACAGCAGCAG | 1315 | KIF11 | AATTTACCGGAATTGTCTCTT |
| 1165 | E2F4 | GTCCGGACCCAACCCTTCTAC | 1316 | KIF11 | AAATTTACCGGAATTGTCTCT |
| 1166 | E2F4 | TACCTCCTTTGAGCCCATCAA | 1317 | KIF11 | AGTATACTGCCCCAGAACTGC |
| 1167 | E2F4 | GAGCCCATCAAGGCAGACCCC | 1318 | KIF11 | TTCAGTATACTGCCCCAGAAC |
| 1168 | E2F4 | AGCCCATCAAGGCAGACCCCA | 1319 | KIF11 | GAGGTTCTTCAGTATACTGCC |
| 1169 | E2F4 | CTTGTTTTTCAGTTTTGGAAC | 1320 | KIF11 | ACTTAGAGGTTCTTCAGTATA |
| 1170 | E2F4 | TTTTTCAGTTTTGGAACTCCC | 1321 | KIF11 | ATGAACAATCCACACCAGCAT |
| 1171 | E2F4 | TTCAGTTTTGGAACTCCCCAA | 1322 | KIF11 | TCTGATATGACATACCTGGAA |
| 1172 | E2F4 | TCAGTTTTGGAACTCCCCAAA | 1323 | KIF11 | CATGTGATTTTTTATGCTGTG |
| 1173 | E2F4 | CAGTTTTGGAACTCCCCAAAG | 1324 | KIF11 | CCATGTGATTTTTTATGCTGT |
| 1174 | E2F4 | AGTTTTGGAACTCCCCAAAGA | 1325 | KIF11 | TCCATGTGATTTTTTATGCTG |
| 1175 | E2F4 | TGGAACTCCCCAAAGAGCTGT | 1326 | KIF11 | TCTTTTCCATGTGATTTTTTA |
| 1176 | E2F4 | GGAACTCCCCAAAGAGCTGTC | 1327 | KIF11 | GTCTTTTCCATGTGATTTTTT |
| 1177 | E2F4 | CCAGAGTGCATGAGCTCGGAG | 1328 | KIF11 | TTTGTCTTTTCCATGTGATTT |
| 1178 | E2F4 | GCCCCTCTGCTTCGTCTTTCT | 1329 | KIF11 | CTTTGTCTTTTCCATGTGATT |
| 1179 | E2F4 | CCCCTCTGCTTCGTCTTTCTC | 1330 | KIF11 | TCTTTGTCTTTTCCATGTGAT |
| 1180 | E2F4 | GTCTTTCTCCACCCCCGGGAG | 1331 | KIF11 | ATGCCTCTGTTTTCTTTGTCT |
| 1181 | E2F4 | CTCCACCCCCGGGAGACCACG | 1332 | KIF11 | GACCTCTCCAGTGTGTTAATG |
| 1182 | E2F4 | TCCACCCCCGGGAGACCACGA | 1333 | KIF11 | AGACCTCTCCAGTGTGTTAAT |
| 1183 | E2F4 | TATCTACAACCTGGACGAGAG | 1334 | KIF11 | CACTTTAGACCTCTCCAGTGT |
| 1184 | E2F4 | GATGTGCCTGTTCTCAACCTC | 1335 | KIF11 | TTCCACTTTAGACCTCTCCAG |
| 1185 | E2F4 | ATGTGCCTGTTCTCAACCTCT | 1336 | KIF11 | CTTCCACTTTAGACCTCTCCA |
| 1186 | E2F4 | TGCACTGCCAGGGACAGCAGT | 1337 | KIF11 | TAACCAAGTGCTCTGTAGTTT |
| 1187 | E2F4 | CCTGGACTTCTGCACTGCCAG | 1338 | KIF11 | GTAACCAAGTGCTCTGTAGTT |
| 1188 | E2F4 | CTATCAGTCCCAGGGCCGCCA | 1339 | KIF11 | ATCTGGGCTCGCAGAGGTAAT |
| 1189 | E2F4 | GGCCCAGTGGGAGTGAACTGA | 1340 | KIF11 | AAGGTTGATCTGGGCTCGCAG |
| 1190 | E2F4 | TTGGGCCCAGTGGGAGTGAAC | 1341 | KIF11 | CCAACCCCCAAGTGAATTAAA |
| 1191 | E2F4 | GGTCCGGACGAACTGCTGCTG | | | |

TABLE 12
Mad7 guide RNAs

| SEQ | | | SEQ | | |
|---|---|---|---|---|---|
| ID NO | Gene | Target Domain Sequence (DNA) | ID NO | Gene | Target Domain Sequence (DNA) |
| 1342 | GAPDH | TGCAGACCACAGTCCATGCCA | 1489 | E2F4 | TTGGGCCCAGTGGGAGTGAAC |
| 1343 | GAPDH | GCAGACCACAGTCCATGCCAT | 1490 | E2F4 | GGTCCGGACGAACTGCTGCTG |
| 1344 | GAPDH | CAGACCACAGTCCATGCCATC | 1491 | E2F4 | ATGGGCTCAAAGGAGGTAGAA |
| 1345 | GAPDH | TCATCTTCTAGGTATGACAAC | 1492 | E2F4 | TGACAGCTCTTTGGGGAGTTC |
| 1346 | GAPDH | CATCTTCTAGGTATGACAACG | 1493 | E2F4 | CTGACAGCTCTTTGGGGAGTT |
| 1347 | GAPDH | ATCTTCTAGGTATGACAACGA | 1494 | E2F4 | TGAGGACATCAACTCCTCCAG |
| 1348 | GAPDH | TAGGTATGACAACGAATTTGG | 1495 | E2F4 | CAGGGCCACCCACCTTCTGAG |
| 1349 | GAPDH | CCCAGCTCTCATACCATGAGT | 1496 | E2F4 | TAGATATAATCGTGGTCTCCC |
| 1350 | TBP | TATCCACAGTGAATCTTGGTT | 1497 | E2F4 | ACTCTCGTCCAGGTTGTAGAT |
| 1351 | TBP | GTTGTAAACTTGACCTAAAGA | 1498 | G6PD | TGGGGGTTCACCCACTTGTAG |
| 1352 | TBP | TAAACTTGACCTAAAGACCAT | 1499 | G6PD | ACCCACTTGTAGGTGCCCTCA |
| 1353 | TBP | ACCTAAAGACCATTGCACTTC | 1500 | G6PD | TAGGTGCCCTCATACTGGAAA |
| 1354 | TBP | CACTTCGTGCCCGAAACGCCG | 1501 | G6PD | ATCAGCTCGTCTGCCTCCGTG |
| 1355 | TBP | GTGCCCGAAACGCCGAATATA | 1502 | G6PD | CCTCACCTGCCATAAATATAG |
| 1356 | TBP | TCTCTGACCATTGTAGCGGTT | 1503 | G6PD | CTCACCTGCCATAAATATAGG |
| 1357 | TBP | TAGCGGTTTGCTGCGGTAATC | 1504 | G6PD | GGCTTCTCCAGCTCAATCTGG |
| 1358 | TBP | GCTGCGGTAATCATGAGGATA | 1505 | G6PD | TCCAGCTCAATCTGGTGCAGC |
| 1359 | TBP | CTGCGGTAATCATGAGGATAA | 1506 | G6PD | TCTGTAGGGCACCTTGTATCT |
| 1360 | TBP | TCAGTTCTGGGAAAATGGTGT | 1507 | G6PD | TATCTGTTGCCGTAGGTCAGG |
| 1361 | TBP | CAGTTCTGGGAAAATGGTGTG | 1508 | G6PD | CCGTAGGTCAGGTCCAGCTCC |
| 1362 | TBP | AGTTCTGGGAAAATGGTGTGC | 1509 | G6PD | AAGAACATGCCCGGCTTCTTG |
| 1363 | TBP | TGGGAAAATGGTGTGCACAGG | 1510 | G6PD | TTGGTCATCATCTTGGTGTAC |
| 1364 | TBP | TTTCCTTTCCCTAGTGAAGAA | 1511 | G6PD | GTCATCATCTTGGTGTACACG |
| 1365 | TBP | TTCCTTTCCCTAGTGAAGAAC | 1512 | G6PD | GTGTACACGGCCTCGTTGGGC |
| 1366 | TBP | TCCTTTCCCTAGTGAAGAACA | 1513 | G6PD | GGCTGCACGCGGATCACCAGC |
| 1367 | TBP | CCTTTCCCTAGTGAAGAACAG | 1514 | G6PD | CGCTTGCACTGCTGGTGGAAG |
| 1368 | TBP | CTTTCCCTAGTGAAGAACAGT | 1515 | G6PD | CACTGCTGGTGGAAGATGTCG |
| 1369 | TBP | CCCTAGTGAAGAACAGTCCAG | 1516 | G6PD | CGCTCGTTCAGGGCCTTGCCG |
| 1370 | TBP | CCTAGTGAAGAACAGTCCAGA | 1517 | G6PD | AGGGCCTTGCCGCAGCGCAGG |
| 1371 | TBP | TACAGAAGTTGGGTTTTCCAG | 1518 | G6PD | CCGCAGCGCAGGATGAAGGGC |
| 1372 | TBP | GGTTTTCCAGCTAAGTTCTTG | 1519 | G6PD | CAGTATGAGGGCACCTACAAG |
| 1373 | TBP | TCCAGCTAAGTTCTTGGACTT | 1520 | G6PD | CCAGTATGAGGGCACCTACAA |
| 1374 | TBP | CCAGCTAAGTTCTTGGACTTC | 1521 | G6PD | AGCTGGAGAAGCCCAAGCCCA |
| 1375 | TBP | CAGCTAAGTTCTTGGACTTCA | 1522 | G6PD | ACCCCACTGCTGCACCAGATT |
| 1376 | TBP | TTGGACTTCAAGATTCAGAAT | 1523 | G6PD | CACCCCACTGCTGCACCAGAT |
| 1377 | TBP | GACTTCAAGATTCAGAATATG | 1524 | G6PD | TCACCCCACTGCTGCACCAGA |
| 1378 | TBP | AAGATTCAGAATATGGTGGGG | 1525 | G6PD | TGCGGGAGCCAGATGCACTTC |
| 1379 | TBP | AGAATATGGTGGGGAGCTGTG | 1526 | G6PD | AACCCCGAGGAGTCGGAGCTG |
| 1380 | TBP | CCTATAAGGTTAGAAGGCCTT | 1527 | G6PD | TTCAACCCCGAGGAGTCGGAG |
| 1381 | TBP | CTATAAGGTTAGAAGGCCTTG | 1528 | G6PD | CACCAGCAGTGCAAGCGCAAC |
| 1382 | TBP | TGCTCACCCACCAACAATTTA | 1529 | G6PD | CATGATGTGGCCGGCGACATC |
| 1383 | TBP | TTGCAATTTTCCTTCTAGTTA | 1530 | G6PD | ATCCTGCGCTGCGGCAAGGCC |
| 1384 | TBP | TGCAATTTTCCTTCTAGTTAT | 1531 | G6PD | CGCCACGTAGGGGTGCCCTTC |
| 1385 | TBP | GCAATTTTCCTTCTAGTTATG | 1532 | G6PD | CCGCCACGTAGGGGTGCCCTT |
| 1386 | TBP | CAATTTTCCTTCTAGTTATGA | 1533 | KIF11 | ATGAAGATAAATTGATAGCAC |
| 1387 | TBP | TCCTTCTAGTTATGAGCCAGA | 1534 | KIF11 | ATAGCACAAAATCTAGAACTT |
| 1388 | TBP | CCTTCTAGTTATGAGCCAGAG | 1535 | KIF11 | ATGAAACCATAAAAATTGGTT |
| 1389 | TBP | CTTCTAGTTATGAGCCAGAGT | 1536 | KIF11 | GTTTGACTAAGCTTAATTGCT |
| 1390 | TBP | TAGTTATGAGCCAGAGTTATT | 1537 | KIF11 | GACTAAGCTTAATTGCTTTCT |
| 1391 | TBP | TGAGCCAGAGTTATTTCCTGG | 1538 | KIF11 | ACTAAGCTTAATTGCTTTCTG |
| 1392 | TBP | CCTGGTTTAATCTACAGAATG | 1539 | KIF11 | ATTGCTTTCTGGAACAGGATC |
| 1393 | TBP | CTGGTTTAATCTACAGAATGA | 1540 | KIF11 | CTTTCTGGAACAGGATCTGAA |
| 1394 | TBP | AATCTACAGAATGATCAAACC | 1541 | KIF11 | CTGGAACAGGATCTGAAACTG |
| 1395 | TBP | ATCTACAGAATGATCAAACCC | 1542 | KIF11 | TGGAACAGGATCTGAAACTGG |
| 1396 | TBP | TTCTCCTTATTTTTGTTTCTG | 1543 | KIF11 | TCTAATGTCCGTTAAAGGTAC |
| 1397 | TBP | TCCTTATTTTTGTTTCTGGAA | 1544 | KIF11 | AAGGTACGACACCACAGAGGA |
| 1398 | TBP | TTTTTGTTTCTGGAAAAGTTG | 1545 | KIF11 | TTTATACCCATCAACACTGGT |
| 1399 | TBP | TTGTTTCTGGAAAAGTTGTAT | 1546 | KIF11 | ATACCCATCAACACTGGTAAG |
| 1400 | TBP | TGTTTCTGGAAAAGTTGTATT | 1547 | KIF11 | TACCCATCAACACTGGTAAGA |
| 1401 | TBP | GTTTCTGGAAAAGTTGTATTA | 1548 | KIF11 | ATCAGCTGAAAAGGAAACAGC |
| 1402 | TBP | TTTCTGGAAAAGTTGTATTAA | 1549 | KIF11 | ATGATGCTAAACTGTTCAGAA |
| 1403 | TBP | CTGGAAAAGTTGTATTAACAG | 1550 | KIF11 | AGAAAACAACAAAGAAGAGAC |
| 1404 | TBP | TGGAAAAGTTGTATTAACAGG | 1551 | KIF11 | CTTCTTTTAGGATGTGGATGT |
| 1405 | TBP | TCTTCTTAGGTGCTAAAGTCA | 1552 | KIF11 | TTCTTTTAGGATGTGGATGTA |
| 1406 | TBP | TTAGGTGCTAAAGTCAGAGCA | 1553 | KIF11 | TTTTAGGATGTGGATGTAGAA |
| 1407 | TBP | GGTGCTAAAGTCAGAGCAGAA | 1554 | KIF11 | TAGGATGTGGATGTAGAAGAG |
| 1408 | TBP | TAAAGGGATTCAGGAAGACGA | 1555 | KIF11 | AGGATGTGGATGTAGAAGAGG |
| 1409 | TBP | GGTCAAGTTTACAACCAAGAT | 1556 | KIF11 | GGATGTGGATGTAGAAGAGGC |
| 1410 | TBP | AGGTCAAGTTTACAACCAAGA | 1557 | KIF11 | TGGGGCAGTATACTGAAGAAC |
| 1411 | TBP | GGGCACGAAGTGCAATGGTCT | 1558 | KIF11 | TTCATCAATTGGCGGGGTTCC |
| 1412 | TBP | CGGGCACGAAGTGCAATGGTC | 1559 | KIF11 | ATCAATTGGCGGGGTTCCATT |
| 1413 | TBP | GGCGTTTCGGGCACGAAGTGC | 1560 | KIF11 | GCGGGGTTCCATTTTTCCAGG |
| 1414 | TBP | TATTCGGCGTTTCGGGCACGA | 1561 | KIF11 | TCCCGCCTTAAATCCACAGCA |
| 1415 | TBP | GGATTATATTCGGCGTTTCGG | 1562 | KIF11 | CCCGCCTTAAATCCACAGCAT |
| 1416 | TBP | AAATAGATCTAACCTTGGGAT | 1563 | KIF11 | CCGCCTTAAATCCACAGCATA |
| 1417 | TBP | TCCTCATGATTACCGCAGCAA | 1564 | KIF11 | AATCCACAGCATAAAAAATCA |
| 1418 | TBP | GTGGCTCTCTTATCCTCATGA | 1565 | KIF11 | ACACACTGGAGAGGTCTAAAG |
| 1419 | TBP | CCAGAACTGAAAATCAGTGCC | 1566 | KIF11 | GTTACAAAGAGCAGATTACCT |
| 1420 | TBP | CCCAGAACTGAAAATCAGTGC | 1567 | KIF11 | CAAAGAGCAGATTACCTCTGC |
| 1421 | TBP | TCCCAGAACTGAAAATCAGTG | 1568 | KIF11 | CCTCTGCGAGCCCAGATCAAC |
| 1422 | TBP | GCTCCTGTGCACACCATTTTC | 1569 | KIF11 | TAGATTTTGTGCTATCAATTT |
| 1423 | TBP | CGGCTACCTCTTGGCTCCTGT | 1570 | KIF11 | AGTTCTAGATTTTGTGCTATC |
| 1424 | TBP | TTACGGCTACCTCTTGGCTCC | 1571 | KIF11 | ATTAAGTTCTAGATTTTGTGC |
| 1425 | TBP | CTTACGGCTACCTCTTGGCTC | 1572 | KIF11 | CATTAAGTTCTAGATTTTGTG |
| 1426 | TBP | CTGCCAGTCTGGACTGTTCTT | 1573 | KIF11 | TGGTTTCATTAAGTTCTAGAT |
| 1427 | TBP | TTGCTGCCAGTCTGGACTGTT | 1574 | KIF11 | ATGGTTTCATTAAGTTCTAGA |
| 1428 | TBP | CTTGCTGCCAGTCTGGACTGT | 1575 | KIF11 | TATGGTTTCATTAAGTTCTAG |
| 1429 | TBP | TCTTGCTGCCAGTCTGGACTG | 1576 | KIF11 | TTATGGTTTCATTAAGTTCTA |
| 1430 | TBP | TGTACAACTCTAGCATATTTT | 1577 | KIF11 | GTCAAACCAATTTTTATGGTT |
| 1431 | TBP | GCTGGAAAACCCAACTTCTGT | 1578 | KIF11 | AGCTTAGTCAAACCAATTTTT |
| 1432 | TBP | AAGTCCAAGAACTTAGCTGGA | 1579 | KIF11 | CAGAAAGCAATTAAGCTTAGT |
| 1433 | TBP | TGAATCTTGAAGTCCAAGAAC | 1580 | KIF11 | AGATCCTGTTCCAGAAAGCAA |
| 1434 | TBP | ACATCACAGCTCCCCACCATA | 1581 | KIF11 | CAGATCCTGTTCCAGAAAGCA |
| 1435 | TBP | TAACCTTATAGGAAACTTCAC | 1582 | KIF11 | GGATATCCAGTTTCAGATCCT |
| 1436 | TBP | GTGGGTGAGCACAAGGCCTTC | 1583 | KIF11 | AAGTACCTGTTGGGATATCCA |
| 1437 | TBP | TTGGTGGGTGAGCACAAGGCC | 1584 | KIF11 | AAAGTACCTGTTGGGATATCC |
| 1438 | TBP | CCTACTAAATTGTTGGTGGGT | 1585 | KIF11 | TAAAGTACCTGTTGGGATATC |
| 1439 | TBP | AGACTTACCTACTAAATTGTT | 1586 | KIF11 | TCTTTTAAAGTACCTGTTGGG |
| 1440 | TBP | CAGACTTACCTACTAAATTGT | 1587 | KIF11 | CTCTTTTAAAGTACCTGTTGG |
| 1441 | TBP | AACCAGGAAATAACTCTGGCT | 1588 | KIF11 | TATTTCTCTTTTAAAGTACCT |
| 1442 | TBP | TGTAGATTAAACCAGGAAATA | 1589 | KIF11 | ATGGGTATAAATAACTTTTCC |
| 1443 | TBP | ATCATTCTGTAGATTAAACCA | 1590 | KIF11 | CCAGTGTTGATGGGTATAAAT |
| 1444 | TBP | GATCATTCTGTAGATTAAACC | 1591 | KIF11 | TTACCAGTGTTGATGGGTATA |
| 1445 | TBP | TGGGTTTGATCATTCTGTAGA | 1592 | KIF11 | AGTTCTTACCAGTGTTGATGG |
| 1446 | TBP | CAGAAACAAAAATAAGGAGAA | 1593 | KIF11 | ACGTGGTTCAGTTCTTACCAG |
| 1447 | TBP | CCAGAAACAAAAATAAGGAGA | 1594 | KIF11 | AGCTGATCAAGGAGATGTTCA |
| 1448 | TBP | TCCAGAAACAAAAATAAGGAG | 1595 | KIF11 | CAGCTGATCAAGGAGATGTTC |
| 1449 | TBP | ATACAACTTTTCCAGAAACAA | 1596 | KIF11 | TCAGCTGATCAAGGAGATGTT |
| 1450 | TBP | CCTGTTAATACAACTTTTCCA | 1597 | KIF11 | CTTTTCAGCTGATCAAGGAGA |
| 1451 | TBP | CAACTTACCTGTTAATACAAC | 1598 | KIF11 | CCTTTTCAGCTGATCAAGGAG |
| 1452 | TBP | CTGTTACAACTTACCTGTTAA | 1599 | KIF11 | ACAGCTCAGGCTGTTTCCTTT |
| 1453 | TBP | ATAAATTTCTGCTCTGACTTT | 1600 | KIF11 | GCATCATTAACAGCTCAGGCT |
| 1454 | TBP | AAATGCTTCATAAATTTCTGC | 1601 | KIF11 | AGCATCATTAACAGCTCAGGC |
| 1455 | TBP | CAAATGCTTCATAAATTTCTG | 1602 | KIF11 | TGAACAGTTTAGCATCATTAA |
| 1456 | TBP | TCAAATGCTTCATAAATTTCT | 1603 | KIF11 | CTGAACAGTTTAGCATCATTA |
| 1457 | TBP | CTGAATCCCTTTAGAATAGGG | 1604 | KIF11 | TCTGAACAGTTTAGCATCATT |
| 1458 | TBP | CGTCGTCTTCCTGAATCCCTT | 1605 | KIF11 | TTTTCTGAACAGTTTAGCATC |
| 1459 | E2F4 | GGGGGCTATCATTGTAGTGAG | 1606 | KIF11 | TTGTTTTCTGAACAGTTTAGC |
| 1460 | E2F4 | GGGGCTATCATTGTAGTGAGT | 1607 | KIF11 | TTTGTTGTTTTCTGAACAGTT |
| 1461 | E2F4 | TAGTGAGTGGCGGCCCTGGGA | 1608 | KIF11 | TCTCTTCTTTGTTGTTTTCTG |
| 1462 | E2F4 | ACTCCCACTGGGCCCAACAAC | 1609 | KIF11 | CCGGAATTGTCTCTTCTTTGT |
| 1463 | E2F4 | TGCCCTGCTGGACAGCAGCAG | 1610 | KIF11 | ACCGGAATTGTCTCTTCTTTG |
| 1464 | E2F4 | GTCCGGACCCAACCCTTCTAC | 1611 | KIF11 | AATTTACCGGAATTGTCTCTT |
| 1465 | E2F4 | TACCTCCTTTGAGCCCATCAA | 1612 | KIF11 | AAATTTACCGGAATTGTCTCT |
| 1466 | E2F4 | GAGCCCATCAAGGCAGACCCC | 1613 | KIF11 | AGTATACTGCCCCAGAACTGC |
| 1467 | E2F4 | AGCCCATCAAGGCAGACCCCA | 1614 | KIF11 | TTCAGTATACTGCCCCAGAAC |
| 1468 | E2F4 | CTTGTTTTTCAGTTTTGGAAC | 1615 | KIF11 | GAGGTTCTTCAGTATACTGCC |
| 1469 | E2F4 | TTTTTCAGTTTTGGAACTCCC | 1616 | KIF11 | ACTTAGAGGTTCTTCAGTATA |
| 1470 | E2F4 | TTCAGTTTTGGAACTCCCCAA | 1617 | KIF11 | ATGAACAATCCACACCAGCAT |
| 1471 | E2F4 | TCAGTTTTGGAACTCCCCAAA | 1618 | KIF11 | TCTGATATGACATACCTGGAA |
| 1472 | E2F4 | CAGTTTTGGAACTCCCCAAAG | 1619 | KIF11 | TCTTTTCCATGTGATTTTTTA |
| 1473 | E2F4 | AGTTTTGGAACTCCCCAAAGA | 1620 | KIF11 | GTCTTTTCCATGTGATTTTTT |
| 1474 | E2F4 | TGGAACTCCCCAAAGAGCTGT | 1621 | KIF11 | TTTGTCTTTTCCATGTGATTT |
| 1475 | E2F4 | GGAACTCCCCAAAGAGCTGTC | 1622 | KIF11 | CTTTGTCTTTTCCATGTGATT |
| 1476 | E2F4 | CCAGAGTGCATGAGCTCGGAG | 1623 | KIF11 | TCTTTGTCTTTTCCATGTGAT |
| 1477 | E2F4 | GCCCCTCTGCTTCGTCTTTCT | 1624 | KIF11 | ATGCCTCTGTTTTCTTTGTCT |
| 1478 | E2F4 | CCCCTCTGCTTCGTCTTTCTC | 1625 | KIF11 | GACCTCTCCAGTGTGTTAATG |
| 1479 | E2F4 | GTCTTTCTCCACCCCCGGGAG | 1626 | KIF11 | AGACCTCTCCAGTGTGTTAAT |
| 1480 | E2F4 | CTCCACCCCCGGGAGACCACG | 1627 | KIF11 | CACTTTAGACCTCTCCAGTGT |
| 1481 | E2F4 | TCCACCCCCGGGAGACCACGA | 1628 | KIF11 | TTCCACTTTAGACCTCTCCAG |
| 1482 | E2F4 | TATCTACAACCTGGACGAGAG | 1629 | KIF11 | CTTCCACTTTAGACCTCTCCA |
| 1483 | E2F4 | GATGTGCCTGTTCTCAACCTC | 1630 | KIF11 | TAACCAAGTGCTCTGTAGTTT |
| 1484 | E2F4 | ATGTGCCTGTTCTCAACCTCT | 1631 | KIF11 | GTAACCAAGTGCTCTGTAGTT |
| 1485 | E2F4 | TGCACTGCCAGGGACAGCAGT | 1632 | KIF11 | ATCTGGGCTCGCAGAGGTAAT |
| 1486 | E2F4 | CCTGGACTTCTGCACTGCCAG | 1633 | KIF11 | AAGGTTGATCTGGGCTCGCAG |
| 1487 | E2F4 | CTATCAGTCCCAGGGCCGCCA | 1634 | KIF11 | CCAACCCCCAAGTGAATTAAA |
| 1488 | E2F4 | GGCCCAGTGGGAGTGAACTGA | | | |

TABLE 13
SpyCas9 guide

| SEQ | | | SEQ | | |
|---|---|---|---|---|---|
| ID NO | Gene | Target Domain Sequence (DNA) | ID NO | Gene | Target Domain Sequence (DNA) |
| 1635 | GAPDH | TCTAGGTATGACAACGAATT | 1761 | G6PD | GTGGGGGTTCACCCACTTGT |
| 1636 | GAPDH | AGCCCCAGCGTCAAAGGTGG | 1762 | G6PD | ACTTGTAGGTGCCCTCATAC |
| 1637 | TBP | ATTGTATCCACAGTGAATCT | 1763 | G6PD | CATCAGCTCGTCTGCCTCCG |
| 1638 | TBP | AAACGCCGAATATAATCCCA | 1764 | G6PD | ATCAGCTCGTCTGCCTCCGT |
| 1639 | TBP | ACCATTGTAGCGGTTTGCTG | 1765 | G6PD | TCAGCTCGTCTGCCTCCGTG |
| 1640 | TBP | GGTTTGCTGCGGTAATCATG | 1766 | G6PD | CGTCTGCCTCCGTGGGGCCT |
| 1641 | TBP | GATAAGAGAGCCACGAACCA | 1767 | G6PD | TGCCTCCGTGGGGCCTCGGC |
| 1642 | TBP | ACGGCACTGATTTTCAGTTC | 1768 | G6PD | TCCTCACCTGCCATAAATAT |
| 1643 | TBP | CGGCACTGATTTTCAGTTCT | 1769 | G6PD | CCTCACCTGCCATAAATATA |
| 1644 | TBP | GATTTTCAGTTCTGGGAAAA | 1770 | G6PD | CTCACCTGCCATAAATATAG |
| 1645 | TBP | TCTGGGAAAATGGTGTGCAC | 1771 | G6PD | CCTGCCATAAATATAGGGGA |
| 1646 | TBP | TGGTGTGCACAGGAGCCAAG | 1772 | G6PD | CTGCCATAAATATAGGGGAT |
| 1647 | TBP | TAGTGAAGAACAGTCCAGAC | 1773 | G6PD | ATAAATATAGGGGATGGGCT |
| 1648 | TBP | TGCTAGAGTTGTACAGAAGT | 1774 | G6PD | TAAATATAGGGGATGGGCTT |
| 1649 | TBP | GCTAGAGTTGTACAGAAGTT | 1775 | G6PD | TGGGCTTCTCCAGCTCAATC |
| 1650 | TBP | GGGTTTTCCAGCTAAGTTCT | 1776 | G6PD | AGCTCAATCTGGTGCAGCAG |
| 1651 | TBP | GGACTTCAAGATTCAGAATA | 1777 | G6PD | GCTCAATCTGGTGCAGCAGT |
| 1652 | TBP | CTTCAAGATTCAGAATATGG | 1778 | G6PD | CTCAATCTGGTGCAGCAGTG |
| 1653 | TBP | TTCAAGATTCAGAATATGGT | 1779 | G6PD | CAGTGGGGTGAAAATACGCC |
| 1654 | TBP | TCAAGATTCAGAATATGGTG | 1780 | G6PD | TGAAAATACGCCAGGCCTCA |
| 1655 | TBP | GTGATGTGAAGTTTCCTATA | 1781 | G6PD | CCTCACGGAGCTCGTCGCTG |
| 1656 | TBP | AAGTTTCCTATAAGGTTAGA | 1782 | G6PD | ACCTGCGCACGAAGTGCATC |
| 1657 | TBP | TCACCCACCAACAATTTAGT | 1783 | G6PD | GGCTCCCGCAGAAGACGTCC |
| 1658 | TBP | TATGAGCCAGAGTTATTTCC | 1784 | G6PD | CGCAGAAGACGTCCAGGATG |
| 1659 | TBP | GTTCTCCTTATTTTTGTTTC | 1785 | G6PD | GTCCAGGATGAGGCGCTCAT |
| 1660 | TBP | TCTGGAAAAGTTGTATTAAC | 1786 | G6PD | ATGAGGCGCTCATAGGCGTC |
| 1661 | TBP | AAACATCTACCCTATTCTAA | 1787 | G6PD | TGAGGCGCTCATAGGCGTCA |
| 1662 | TBP | ACCCTATTCTAAAGGGATTC | 1788 | G6PD | CACCTTGTATCTGTTGCCGT |
| 1663 | TBP | GATTCAGGAAGACGACGTAA | 1789 | G6PD | TGTATCTGTTGCCGTAGGTC |
| 1664 | TBP | CACGAAGTGCAATGGTCTTT | 1790 | G6PD | CAGGTCCAGCTCCGACTCCT |
| 1665 | TBP | GTTTCGGGCACGAAGTGCAA | 1791 | G6PD | AGGTCCAGCTCCGACTCCTC |
| 1666 | TBP | GGGATTATATTCGGCGTTTC | 1792 | G6PD | GGTCCAGCTCCGACTCCTCG |
| 1667 | TBP | TGGGATTATATTCGGCGTTT | 1793 | G6PD | TCGGGGTTGAAGAACATGCC |
| 1668 | TBP | TCTAACCTTGGGATTATATT | 1794 | G6PD | GAAGAACATGCCCGGCTTCT |
| 1669 | TBP | ATTAAAATAGATCTAACCTT | 1795 | G6PD | CGGCTTCTTGGTCATCATCT |
| 1670 | TBP | AAAATCAGTGCCGTGGTTCG | 1796 | G6PD | GGTCATCATCTTGGTGTACA |
| 1671 | TBP | AGAACTGAAAATCAGTGCCG | 1797 | G6PD | CTTGGTGTACACGGCCTCGT |
| 1672 | TBP | AATTTCTTACGGCTACCTCT | 1798 | G6PD | TTGGTGTACACGGCCTCGTT |
| 1673 | TBP | AGTCTGGACTGTTCTTCACT | 1799 | G6PD | CGGCCTCGTTGGGCTGCACG |
| 1674 | TBP | ATATTTTCTTGCTGCCAGTC | 1800 | G6PD | GCTCGTTGCGCTTGCACTGC |
| 1675 | TBP | TTGAAGTCCAAGAACTTAGC | 1801 | G6PD | CGTTGCGCTTGCACTGCTGG |
| 1676 | TBP | ACAAGGCCTTCTAACCTTAT | 1802 | G6PD | CTGCTGGTGGAAGATGTCGC |
| 1677 | TBP | ATTGTTGGTGGGTGAGCACA | 1803 | G6PD | AGATGTCGCCGGCCACATCA |
| 1678 | TBP | TTACCTACTAAATTGTTGGT | 1804 | G6PD | ATGGAACTGCAGCCTCACCT |
| 1679 | TBP | CTTACCTACTAAATTGTTGG | 1805 | G6PD | CCTCGGCCTTGCGCTCGTTC |
| 1680 | TBP | AGACTTACCTACTAAATTGT | 1806 | G6PD | CTCGGCCTTGCGCTCGTTCA |
| 1681 | TBP | ATTAAACCAGGAAATAACTC | 1807 | G6PD | TCAGGGCCTTGCCGCAGCGC |
| 1682 | TBP | ATCATTCTGTAGATTAAACC | 1808 | G6PD | CTTGCCGCAGCGCAGGATGA |
| 1683 | TBP | AAAATAAGGAGAACAATTCT | 1809 | G6PD | TTGCCGCAGCGCAGGATGAA |
| 1684 | TBP | CTTTTCCAGAAACAAAAATA | 1810 | G6PD | GTATGAGGGCACCTACAAGT |
| 1685 | TBP | TCCTGAATCCCTTTAGAATA | 1811 | G6PD | AGTATGAGGGCACCTACAAG |
| 1686 | TBP | TTCCTGAATCCCTTTAGAAT | 1812 | G6PD | AGAGTGGGTTTCCAGTATGA |
| 1687 | E2F4 | CTCACTCCCACTGCTGTCCC | 1813 | G6PD | GAGAGTGGGTTTCCAGTATG |
| 1688 | E2F4 | CCCTGGCAGTGCAGAAGTCC | 1814 | G6PD | GACGAGCTGATGAAGAGAGT |
| 1689 | E2F4 | CCTGGCAGTGCAGAAGTCCA | 1815 | G6PD | AGACGAGCTGATGAAGAGAG |
| 1690 | E2F4 | CAGTGCAGAAGTCCAGGGAA | 1816 | G6PD | CTCCAGCCGAGGCCCCACGG |
| 1691 | E2F4 | GCAGAAGTCCAGGGAATGGC | 1817 | G6PD | CACCCGTCACTCTCCAGCCG |
| 1692 | E2F4 | GGCCCAGCAGCTGAGATCAC | 1818 | G6PD | CCATCCCCTATATTTATGGC |
| 1693 | E2F4 | GGGGCTATCATTGTAGTGAG | 1819 | G6PD | AAGCCCATCCCCTATATTTA |
| 1694 | E2F4 | GCTATCATTGTAGTGAGTGG | 1820 | G6PD | ACTGCTGCACCAGATTGAGC |
| 1695 | E2F4 | ATTGTAGTGAGTGGCGGCCC | 1821 | G6PD | GCGACGAGCTCCGTGAGGCC |
| 1696 | E2F4 | TTGTAGTGAGTGGCGGCCCT | 1822 | G6PD | CCTCAGCGACGAGCTCCGTG |
| 1697 | E2F4 | CGGCCCTGGGACTGATAGCA | 1823 | G6PD | GCCAGATGCACTTCGTGCGC |
| 1698 | E2F4 | GGGACTGATAGCAAGGACAG | 1824 | G6PD | TCATCCTGGACGTCTTCTGC |
| 1699 | E2F4 | TGAGCTCAGTTCACTCCCAC | 1825 | G6PD | CTCATCCTGGACGTCTTCTG |
| 1700 | E2F4 | GAGCTCAGTTCACTCCCACT | 1826 | G6PD | CGCCTATGAGCGCCTCATCC |
| 1701 | E2F4 | CCCACTGGGCCCAACAACAC | 1827 | G6PD | GACCTACGGCAACAGATACA |
| 1702 | E2F4 | GCCCAACAACACTGGACACC | 1828 | G6PD | TCGGAGCTGGACCTGACCTA |
| 1703 | E2F4 | ACTGCAGTCTTCTGCCCTGC | 1829 | G6PD | CAACCCCGAGGAGTCGGAGC |
| 1704 | E2F4 | AGTAACAGCAGCAGTTCGTC | 1830 | G6PD | GTTCTTCAACCCCGAGGAGT |
| 1705 | E2F4 | TACCTCCTTTGAGCCCATCA | 1831 | G6PD | GGGCATGTTCTTCAACCCCG |
| 1706 | E2F4 | CCCATCAAGGCAGACCCCAC | 1832 | G6PD | AAGATGATGACCAAGAAGCC |
| 1707 | E2F4 | ATCAAGGCAGACCCCACAGG | 1833 | G6PD | CAAGATGATGACCAAGAAGC |
| 1708 | E2F4 | GAAATCTTTGATCCCACACG | 1834 | G6PD | GATCCGCGTGCAGCCCAACG |
| 1709 | E2F4 | TCTTTGATCCCACACGAGGT | 1835 | G6PD | GCAGTGCAAGCGCAACGAGC |
| 1710 | E2F4 | ATTCCCAGAGTGCATGAGCT | 1836 | G6PD | CTGCAGTTCCATGATGTGGC |
| 1711 | E2F4 | GTGCATGAGCTCGGAGCTGC | 1837 | G6PD | GAGGCTGCAGTTCCATGATG |
| 1712 | E2F4 | GAGGAGTTGATGTCCTCAGA | 1838 | G6PD | ACGAGCGCAAGGCCGAGGTG |
| 1713 | E2F4 | GAGTTGATGTCCTCAGAAGG | 1839 | G6PD | CCTGAACGAGCGCAAGGCCG |
| 1714 | E2F4 | AGTTGATGTCCTCAGAAGGT | 1840 | G6PD | CAAGGCCCTGAACGAGCGCA |
| 1715 | E2F4 | GCTTCGTCTTTCTCCACCCC | 1841 | G6PD | CTTCATCCTGCGCTGCGGCA |
| 1716 | E2F4 | CTTCGTCTTTCTCCACCCCC | 1842 | G6PD | GTGCCCTTCATCCTGCGCTG |
| 1717 | E2F4 | CCACGATTATATCTACAACC | 1843 | G6PD | AGAATGAGAGGTGGGATGGT |
| 1718 | E2F4 | TACAACCTGGACGAGAGTGA | 1844 | G6PD | GTGGAGAATGAGAGGTGGGA |
| 1719 | E2F4 | GCACTGCCAGGGACAGCAGT | 1845 | KIF11 | CTTAATGAAACCATAAAAAT |
| 1720 | E2F4 | TGCACTGCCAGGGACAGCAG | 1846 | KIF11 | GACTAAGCTTAATTGCTTTC |
| 1721 | E2F4 | CCTGGACTTCTGCACTGCCA | 1847 | KIF11 | GCTTAATTGCTTTCTGGAAC |
| 1722 | E2F4 | CCCTGGACTTCTGCACTGCC | 1848 | KIF11 | TCTGGAACAGGATCTGAAAC |
| 1723 | E2F4 | CTGCTGGGCCAGCCATTCCC | 1849 | KIF11 | CTGAAACTGGATATCCCAAC |
| 1724 | E2F4 | TGTCCTTGCTATCAGTCCCA | 1850 | KIF11 | TTAAAGGTACGACACCACAG |
| 1725 | E2F4 | CTGTCCTTGCTATCAGTCCC | 1851 | KIF11 | TTATTTATACCCATCAACAC |
| 1726 | E2F4 | CCAGTGTTGTTGGGCCCAGT | 1852 | KIF11 | ATCTCCTTGATCAGCTGAAA |
| 1727 | E2F4 | TCCAGTGTTGTTGGGCCCAG | 1853 | KIF11 | CAACAAAGAAGAGACAATTC |
| 1728 | E2F4 | GCCGGGTGTCCAGTGTTGTT | 1854 | KIF11 | TTAGGATGTGGATGTAGAAG |
| 1729 | E2F4 | GGCCGGGTGTCCAGTGTTGT | 1855 | KIF11 | GGATGTAGAAGAGGCAGTTC |
| 1730 | E2F4 | AGCAGGGCAGAAGACTGCAG | 1856 | KIF11 | GATGTAGAAGAGGCAGTTCT |
| 1731 | E2F4 | GCTGCTGCTGCTGTCCAGCA | 1857 | KIF11 | ATGTAGAAGAGGCAGTTCTG |
| 1732 | E2F4 | GGAGGTAGAAGGGTTGGGTC | 1858 | KIF11 | CAAGAGCCATCTGTAGATGC |
| 1733 | E2F4 | TGGGCTCAAAGGAGGTAGAA | 1859 | KIF11 | GCCATCTGTAGATGCTGGTG |
| 1734 | E2F4 | ATGGGCTCAAAGGAGGTAGA | 1860 | KIF11 | GGTGTGGATTGTTCATCAAT |
| 1735 | E2F4 | TGCCTTGATGGGCTCAAAGG | 1861 | KIF11 | GTGGATTGTTCATCAATTGG |
| 1736 | E2F4 | GTCTGCCTTGATGGGCTCAA | 1862 | KIF11 | TGGATTGTTCATCAATTGGC |
| 1737 | E2F4 | CCTGTGGGGTCTGCCTTGAT | 1863 | KIF11 | GGATTGTTCATCAATTGGCG |
| 1738 | E2F4 | ACCTGTGGGGTCTGCCTTGA | 1864 | KIF11 | TGGCGGGGTTCCATTTTTCC |
| 1739 | E2F4 | GCAGGTACTCACCACCTGTG | 1865 | KIF11 | CCACAGCATAAAAAATCACA |
| 1740 | E2F4 | GGCAGGTACTCACCACCTGT | 1866 | KIF11 | GGAAAAGACAAAGAAAACAG |
| 1741 | E2F4 | GGGCAGGTACTCACCACCTG | 1867 | KIF11 | AAACAGAGGCATTAACACAC |
| 1742 | E2F4 | AGATTTCTGACAGCTCTTTG | 1868 | KIF11 | GAGGCATTAACACACTGGAG |
| 1743 | E2F4 | AAGATTTCTGACAGCTCTTT | 1869 | KIF11 | CACACTGGAGAGGTCTAAAG |
| 1744 | E2F4 | AAAGATTTCTGACAGCTCTT | 1870 | KIF11 | GGAAGAAACTACAGAGCACT |
| 1745 | E2F4 | TGCAGCAGCCTACCTCGTGT | 1871 | KIF11 | CTTAGTCAAACCAATTTTTA |
| 1746 | E2F4 | ATGCAGCAGCCTACCTCGTG | 1872 | KIF11 | TCTCTTTTAAAGTACCTGTT |
| 1747 | E2F4 | GCTCCGAGCTCATGCACTCT | 1873 | KIF11 | TTCTCTTTTAAAGTACCTGT |
| 1748 | E2F4 | AGCTCCGAGCTCATGCACTC | 1874 | KIF11 | TATAAATAACTTTTCCTCTG |
| 1749 | E2F4 | CCAGGGCCACCCACCTTCTG | 1875 | KIF11 | CAGTTCTTACCAGTGTTGAT |
| 1750 | E2F4 | TGGAGAAAGACGAAGCAGAG | 1876 | KIF11 | TCAGTTCTTACCAGTGTTGA |
| 1751 | E2F4 | GTGGAGAAAGACGAAGCAGA | 1877 | KIF11 | TGATCAAGGAGATGTTCACG |
| 1752 | E2F4 | GGTGGAGAAAGACGAAGCAG | 1878 | KIF11 | GTTTCCTTTTCAGCTGATCA |
| 1753 | E2F4 | TAATCGTGGTCTCCCGGGGG | 1879 | KIF11 | TTTAGCATCATTAACAGCTC |
| 1754 | E2F4 | ATATAATCGTGGTCTCCCGG | 1880 | KIF11 | ACAGATGGCTCTTGACTTAG |
| 1755 | E2F4 | GATATAATCGTGGTCTCCCG | 1881 | KIF11 | TCCACACCAGCATCTACAGA |
| 1756 | E2F4 | AGATATAATCGTGGTCTCCC | 1882 | KIF11 | ATATGACATACCTGGAAAAA |
| 1757 | E2F4 | TAGATATAATCGTGGTCTCC | 1883 | KIF11 | AGGTTGATCTGGGCTCGCAG |
| 1758 | E2F4 | CCAGGTTGTAGATATAATCG | 1884 | KIF11 | AGTGAATTAAAGGTTGATCT |
| 1759 | E2F4 | AGACACCTTCACTCTCGTCC | 1885 | KIF11 | AAGTGAATTAAAGGTTGATC |
| 1760 | E2F4 | TGAGAACAGGCACATCAAAG | | | |

[0316] It will be understood that the exemplary gRNAs disclosed herein are provided to illustrate non-limiting embodiments embraced by the present disclosure. Additional suitable gRNA sequences will be apparent to the skilled artisan based on the present disclosure, and the disclosure is not limited in this respect.

### Target Cells

[0317] Methods of the disclosure can be used to edit the genome of any cell. In certain embodiments, the target cell is a stem cell, e.g., an iPS or ES cell. In certain embodiments, the target cell is an iPS- or ES-derived cell, where the genetic modification is made at any stage during the reprogramming process from donor cell to iPSC, during the iPSC stage, and/or at any stage of the process of differentiating the iPSC or ESC to a specialized cell, or even up to or at the final specialized cell state. In certain embodiments, the target cell can be an iPSC-derived B cell, where the genetic modification is made at any stage during the reprogramming process from donor cell to iPSC, during the iPSC stage, and/or at any stage of the process of differentiating the iPSC to a B cell.

[0318] In certain embodiments, a target cell is one or more of a long-term hematopoietic stem cell, a short term hematopoietic stem cell, a multipotent progenitor cell, a lineage restricted progenitor cell, a lymphoid progenitor cell, an induced pluripotent stem (iPS) cell, an embryonic stem cell, a fibroblast, or a B cell, e.g., a progenitor B cell, a Pre B cell, a Pro B cell, an immature B cell, a transitional B cell, a mature B cell, a naïve B cell, a memory B cell, a marginal zone B cell, a follicular B cell, a germinal center B cell, or a plasma B cell.

[0319] In some embodiments, a target cell is a circulating blood cell, e.g., lymphoid progenitor (LP) cell or hematopoietic stem/progenitor cell (HSC). In some embodiments, a target cell is one or more of a bone marrow cell (e.g., LP cell, HSC, multipotent progenitor (MPP) cell, or mesenchymal stem cell). In some embodiments, a target cell is a lymphoid progenitor cell, e.g., a common lymphoid progenitor (CLP) cell. In some embodiments, a target cell is one or more of a hematopoietic stem/progenitor cell (e.g., a long term HSC (LT-HSC), short term HSC (ST-HSC), MPP cell, or lineage restricted progenitor (LRP) cell). In certain embodiments, the target cell is a CD34⁺ cell, CD34⁺CD90⁺ cell, CD34⁺CD38⁻ cell, CD34⁺CD90⁺CD49f⁺CD38⁻CD45RA⁻ cell, CD105⁺ cell, CD31⁺, or CD133⁺ cell, or a CD34⁺CD90⁺CD133⁺ cell. In some embodiments, a target cell is one or more of an umbilical cord blood CD34⁺ HSPC, umbilical cord venous endothelial cell, umbilical cord arterial endothelial cell, amniotic fluid CD34⁺ cell, amniotic fluid endothelial cell, placental endothelial cell, or placental hematopoietic CD34⁺ cell. In some embodiments, a target cell is one or more of a mobilized peripheral blood hematopoietic CD34⁺ cell (after the subject is treated with a mobilization agent, e.g., G-CSF or Plerixafor).

[0320] In certain embodiments, a target cell is a primary cell, e.g., a cell isolated from a human subject. In certain embodiments, a target cell is an immune cell, e.g., a primary immune cell isolated from a human subject. In certain embodiments, a target cell is part of a population of cells isolated from a subject, e.g., a human subject. In some embodiments, the population of cells comprises a population of immune cells isolated from a subject. In some embodiments, the population of cells comprises tumor infiltrating lymphocytes (TILs), e.g., TILs isolated from a human subject. In some embodiments, a target cell is isolated from a healthy subject, e.g., a healthy human donor. In some embodiments, a target cell is isolated from a subject having a disease or illness, e.g., a human patient in need of a treatment.

[0321] In certain embodiments, a target cell is an immune cell, e.g., a primary immune cell, e.g., a B cell, a progenitor B cell, a Pre B cell, a Pro B cell, an immature B cell, a transitional B cell, a mature B cell, a naïve B cell, a memory B cell, a marginal zone B cell, a follicular B cell, a germinal center B cell, a plasmablast, or a plasma B cell. In some embodiments, a target cell is a CD19⁺ B cell, a CD19⁺ Pro B cell, a CD19⁺ Pre B cell, a CD19⁺ immature B cell, a CD19⁺ transitional B cell, a CD19⁺ mature B cell, a CD19⁺ naïve B cell, a CD19⁺ memory B cell, a CD19⁺ marginal zone B cell, a CD19⁺ follicular B cell, a CD19⁺ germinal center B cell, or a CD19⁺ plasmablast. In some embodiments, a target cell is a CD20⁺ B cell, a CD20⁺ immature B cell, a CD20⁺ transitional B cell, a CD20⁺ mature B cell, a CD20⁺ naïve B cell, a CD20⁺ memory B cell, a CD20⁺ marginal zone B cell, a CD20⁺ follicular B cell, or a CD20⁺ germinal center B cell. In some embodiments, a target cell is a CD40⁺ B cell, a CD40⁺ Pre B cell, a CD40⁺ immature B cell, a CD40⁺ transitional B cell, a CD40⁺ mature B cell, a CD40⁺ naïve B cell, a CD40⁺ memory B cell, a CD40⁺ marginal zone B cell, a CD40⁺ follicular B cell, a CD40⁺ germinal center B cell, or a CD40⁺ plasma B cell.

### Stem Cells

[0322] Methods of the disclosure can be used with stem cells. Stem cells are typically cells that have the capacity to produce unaltered daughter cells (self-renewal; cell division produces at least one daughter cell that is identical to the parent cell) and to give rise to specialized cell types (potency). Stem cells include, but are not limited to, embryonic stem (ES) cells, embryonic germ (EG) cells, germline stem (GS) cells, human mesenchymal stem cells (hMSCs), adipose tissue-derived stem cells (ADSCs), multipotent adult progenitor cells (MAPCs), multipotent adult germline stem cells (maGSCs) and unrestricted somatic stem cell (USSCs). Generally, stem cells can divide without limit. After division, the stem cell may remain as a stem cell, become a precursor cell, or proceed to terminal differentiation. A precursor cell is a cell that can generate a fully differentiated functional cell of at least one given cell type. Generally, precursor cells can divide. After division, a precursor cell can remain a precursor cell, or may proceed to terminal differentiation.

[0323] Pluripotent stem cells are generally known in the art. The present disclosure provides technologies (e.g., systems, compositions, methods, etc.) related to pluripotent stem cells. In some embodiments, pluripotent stem cells are stem cells that: (a) are capable of inducing teratomas when transplanted in immunodeficient (SCID) mice; (b) are capable of differentiating to cell types of all three germ layers (e.g., can differentiate to ectodermal, mesodermal, and endodermal cell types); and/or (c) express one or more markers of embryonic stem cells (e.g., human embryonic stem cells express Oct-4, alkaline phosphatase, SSEA-3 surface antigen, SSEA-4 surface antigen, nanog, TRA-1-60, TRA-1-81, Sox-2, REX1, etc.). In some aspects, human pluripotent stem cells do not show expression of differentiation markers. In some embodiments, ES cells and/or iPSCs edited using methods of the disclosure maintain their pluripotency, e.g., (a) are capable of inducing teratomas when transplanted in immunodeficient (SCID) mice; (b) are capable of differentiating to cell types of all three germ layers, e.g., can differentiate to ectodermal, mesodermal, and endodermal cell types); and/or (c) express one or more markers of embryonic stem cells.

[0324] In some embodiments, ES cells (e.g., human ES cells) can be derived from the inner cell mass of blastocysts or morulae. In some embodiments, ES cells can be isolated from one or more blastomeres of an embryo, e.g., without destroying the remainder of the embryo. In some embodiments, ES cells can be produced by somatic cell nuclear transfer. In some embodiments, ES cells can be derived from fertilization of an egg cell with sperm or DNA, nuclear transfer, parthenogenesis, or by means to generate ES cells, e.g., with homozygosity in the HLA region. In some embodiments, human ES cells can be produced or derived from a zygote, blastomeres, or blastocyst-staged mammalian embryo produced by the fusion of a sperm and egg cell, nuclear transfer, parthenogenesis, or the reprogramming of chromatin and subsequent incorporation of the reprogrammed chromatin into a plasma membrane to produce an embryonic cell. Exemplary human ES cells are known in the art and include, but are not limited to, MAO1, MAO9, ACT-4, No. 3, H1, H7, H9, H14 and ACT30 ES cells. In some embodiments, human ES cells, regardless of their source or the particular method used to produce them, can be identified based on, e.g., (i) the ability to differentiate into cells of all three germ layers, (ii) expression of at least Oct-4 and alkaline phosphatase, and/or (iii) ability to produce teratomas when transplanted into immunocompromised animals. In some embodiments, ES cells have been serially passaged as cell lines.

### iPS Cells

[0325] Induced pluripotent stem cells (iPSC) are a type of pluripotent stem cell artificially derived from a non-pluripotent cell, such as an adult somatic cell (e.g., a fibroblast cell or other suitable somatic cell), by inducing expression of certain genes. iPSCs can be derived from any organism, such as a mammal. In some embodiments, iPSCs are produced from mice, rats, rabbits, guinea pigs, goats, pigs, cows, non-human primates or humans. iPSCs are similar to ES cells in many respects, such as the expression of certain stem cell genes and proteins, chromatin methylation patterns, doubling time, embryoid body formation, teratoma formation, viable chimera formation, potency and/or differentiability. Various suitable methods for producing iPSCs are known in the art. In some embodiments, iPSCs can be derived by transfection of certain stem cell-associated genes (such as Oct-3/4 (Pouf51) and Sox-2) into non-pluripotent cells, such as adult fibroblasts. Transfection can be achieved through viral vectors, such as retroviruses, lentiviruses, or adenoviruses. Additional suitable reprogramming methods include the use of vectors that do not integrate into the genome of the host cell, e.g., episomal vectors, or the delivery of reprogramming factors directly via encoding RNA or as proteins has also been described. For example, cells can be transfected with Oct-3/4, Sox-2, Klf4, and/or c-Myc using a retroviral system or with Oct-4, Sox-2, NANOG, and/or LIN28 using a lentiviral system. After 3-4 weeks, small numbers of transfected cells begin to become morphologically and biochemically similar to pluripotent stem cells, and can be isolated through morphological selection, doubling time, or through a reporter gene and antibiotic selection. In one example, iPSCs from adult human cells are generated by the method described by Yu et al., Science 2007; 318(5854):1224 or Takahashi et al., Cell 2007; 131:861-72. Numerous suitable methods for reprogramming are known to those of skill in the art, and the present disclosure is not limited in this respect.

[0326] In some embodiments, a target cell for the editing and cargo integration methods described herein is an iPSC, wherein the edited iPSC is then differentiated, e.g., into an iPSC-derived immune cell. In some embodiments, the differentiated cell is an iPSC-derived B cell.

[0327] A variety of cell types can be used as a donor cell that can be subjected to reprogramming, differentiation, and/or genetic engineering strategies described herein. For example, the donor cell can be a pluripotent stem cell or a differentiated cell, e.g., a somatic cell. In some embodiments, donor cells are manipulated (e.g., subjected to reprogramming, differentiation, and/or genetic engineering) to generate B cells described herein.

[0328] A donor cell can be from any suitable organism. For example, in some embodiments, the donor cell is a mammalian cell, e.g., a human cell or a non-human primate cell. In some embodiments, the donor cell is a somatic cell. In some embodiments, the donor cell is a stem cell or progenitor cell. In certain embodiments, the donor cell is not or was not part of a human embryo and its derivation does not involve destruction of a human embryo.

### Methods of Characterization

[0329] Methods of characterizing cells including characterizing cellular phenotype are known to those of skill in the art. In some embodiments, one or more such methods may include, but not be limited to, for example, morphological analyses and flow cytometry. Cellular lineage and identity markers are known to those of skill in the art. One or more such markers may be combined with one or more characterization methods to determine a composition of a cell population or phenotypic identity of one or more cells. For example, in some embodiments, cells of a particular population will be characterized using flow cytometry (for example, see Ye Li et al., Cell Stem Cell. 2018 Aug. 2; 23(2): 181-192.e5). In some such embodiments, a sample of a population of cells will be evaluated for presence and proportion of one or more cell surface markers and/or one or more intracellular markers. As will be understood by those of skill in the art, such cell surface markers may be representative of different lineages. For example, pluripotent cells may be identified by one or more of any number of markers known to be associated with such cells, such as, for example, CD34. Further, in some embodiments, cells may be identified by markers that indicate some degree of differentiation. Such markers will be known to one of skill in the art. For example, in some embodiments, markers of differentiated cells may include those associated with differentiated hematopoietic cells such as, e.g., CD43, CD45 (differentiated hematopoietic cells). In some embodiments, markers of cells may be associated with B cell phenotypes such as, e.g., cluster of differentiation 19 (CD19), cluster of differentiation 20 (CD20), and cluster of differentiation 40 (CD40).

### Methods of Use

[0330] A variety of diseases, disorders and/or conditions may be treated through use of cells provided by the present disclosure. For example, in some embodiments, a disease, disorder and/or condition may be treated by introducing genetically modified or engineered cells as described herein (e.g., genetically modified B cells) to a subject. Examples of diseases that may be treated include, but are not limited to, cancer, e.g., solid tumors, e.g., of the brain, prostate, breast, lung, colon, uterus, skin, liver, bone, pancreas, ovary, testes, bladder, kidney, head, neck, stomach, cervix, rectum, larynx, or esophagus; and hematological malignancies, e.g., acute and chronic leukemias, lymphomas, multiple myeloma and myelodysplastic syndromes.

[0331] In some embodiments, the present disclosure provides methods of treating a subject in need thereof by administering to the subject a composition comprising any of the cells described herein. In some embodiments, a therapeutic agent or composition may be administered before, during, or after the onset of a disease, disorder, or condition (including, e.g., an injury). In some embodiments, the present disclosure provides any of the cells described herein for use in the preparation of a medicament. In some embodiments, the present disclosure provides any of the cells described herein for use in the treatment of a disease, disorder, or condition, that can be treated by a cell therapy.

[0332] In particular embodiments, the subject has a disease, disorder, or condition, that can be treated by a cell therapy. In some embodiments, a subject in need of cell therapy is a subject with a disease, disorder and/or condition, whereby a cell therapy, e.g., a therapy in which a composition comprising a cell described herein, is administered to the subject, whereby the cell therapy treats at least one symptom associated with the disease, disorder, and/or condition. In some embodiments, a subject in need of cell therapy includes, but is not limited to, a candidate for bone marrow or stem cell transplant, a subject who has received chemotherapy or irradiation therapy, a subject who has or is at risk of having cancer, e.g., a cancer of hematopoietic system, a subject having or at risk of developing a tumor, e.g., a solid tumor, and/or a subject who has or is at risk of having a viral infection or a disease associated with a viral infection.

### Pharmaceutical Compositions

[0333] In some embodiments, the present disclosure provides pharmaceutical compositions comprising one or more genetically modified or engineered cells described herein, e.g., a genetically modified B cell described herein. In some embodiments, a pharmaceutical composition further comprises a pharmaceutically acceptable excipient.

[0334] As one of ordinary skill in the art would understand, both autologous and allogeneic cells can be used in adoptive cell therapies. Autologous cell therapies generally have reduced infection, low probability for GVHD, and rapid immune reconstitution relative to other cell therapies. Allogeneic cell therapies generally have an immune mediated graft-versus-malignancy (GVM) effect, and low rate of relapse relative to other cell therapies. Based on the specific condition(s) of the subject in need of the cell therapy, one of ordinary skill in the art would be able to determine which specific type of therapy(ies) to administer.

[0335] In some embodiments, a pharmaceutical composition comprises pluripotent stem cell-derived hematopoietic lineage cells that are allogeneic to a subject. In some embodiments, a pharmaceutical composition comprises pluripotent stem cell-derived hematopoietic lineage cells that are autologous to a subject. For autologous transplantation, the isolated population of pluripotent stem cell-derived hematopoietic lineage cells can be either a complete or partial HLA-match with the subject being treated. In some embodiments, the pluripotent stem cell-derived hematopoietic lineage cells are not HLA-matched to a subject.

[0336] In some embodiments, pluripotent stem cell-derived hematopoietic lineage cells can be administered to a subject without being expanded ex vivo or in vitro prior to administration. In particular embodiments, an isolated population of derived hematopoietic lineage cells is modulated and treated ex vivo using one or more agents to obtain immune cells with improved therapeutic potential. In some embodiments, the modulated population of derived hematopoietic lineage cells can be washed to remove the treatment agent(s), and the improved population can be administered to a subject without further expansion of the population in vitro. In some embodiments, an isolated population of derived hematopoietic lineage cells is expanded prior to modulating the isolated population with one or more agents.

### Cancers

[0337] Any cancer can be treated using a cell or pharmaceutical composition described herein. Exemplary therapeutic targets of the present disclosure include cancer cells from the bladder, blood, bone, bone marrow, brain, breast, colon, esophagus, eye, gastrointestinal system, gum, head, kidney, liver, lung, nasopharynx, neck, ovary, prostate, skin, stomach, testis, tongue, or uterus. In addition, a cancer may specifically be of the following non-limiting histological type: neoplasm, malignant; carcinoma; carcinoma, undifferentiated; giant and spindle cell carcinoma; small cell carcinoma; papillary carcinoma; squamous cell carcinoma; lymphoepithelial carcinoma; basal cell carcinoma; pilomatrix carcinoma; transitional cell carcinoma; papillary transitional cell carcinoma; adenocarcinoma; gastrinoma, malignant; cholangiocarcinoma; hepatocellular carcinoma; combined hepatocellular carcinoma and cholangiocarcinoma; trabecular adenocarcinoma; adenoid cystic carcinoma; adenocarcinoma in adenomatous polyp; adenocarcinoma, familial polyposis coli; solid carcinoma; carcinoid tumor, malignant; branchiolo-alveolar adenocarcinoma; papillary adenocarcinoma; chromophobe carcinoma; acidophil carcinoma; oxyphilic adenocarcinoma; basophil carcinoma; clear cell adenocarcinoma; granular cell carcinoma; follicular adenocarcinoma; papillary and follicular adenocarcinoma; nonencapsulating sclerosing carcinoma; adrenal cortical carcinoma; endometroid carcinoma; skin appendage carcinoma; apocrine adenocarcinoma; sebaceous adenocarcinoma; ceruminous adenocarcinoma; mucoepidermoid carcinoma; cystadenocarcinoma; papillary cystadenocarcinoma; papillary serous cystadenocarcinoma; mucinous cystadenocarcinoma; mucinous adenocarcinoma; signet ring cell carcinoma; infiltrating duct carcinoma; medullary carcinoma; lobular carcinoma; inflammatory carcinoma; Paget's disease, mammary; acinar cell carcinoma; adenosquamous carcinoma; adenocarcinoma w/squamous metaplasia; thymoma, malignant; ovarian stromal tumor, malignant; thecoma, malignant; granulosa cell tumor, malignant; androblastoma, malignant; sertoli cell carcinoma; Leydig cell tumor, malignant; lipid cell tumor, malignant; paraganglioma, malignant; extra-mammary paraganglioma, malignant; pheochromocytoma; glomangiosarcoma; malignant melanoma; amelanotic melanoma; superficial spreading melanoma; malig melanoma in giant pigmented nevus; epithelioid cell melanoma; blue nevus, malignant; sarcoma; fibrosarcoma; fibrous histiocytoma, malignant; myxosarcoma; liposarcoma; leiomyosarcoma; rhabdomyosarcoma; embryonal rhabdomyosarcoma; alveolar rhabdomyosarcoma; stromal sarcoma; mixed tumor, malignant; mullerian mixed tumor; nephroblastoma; hepatoblastoma; carcinosarcoma; mesenchymoma, malignant; brenner tumor, malignant; phyllodes tumor, malignant; synovial sarcoma; mesothelioma, malignant; dysgerminoma; embryonal carcinoma; teratoma, malignant; struma ovarii, malignant; choriocarcinoma; mesonephroma, malignant; hemangiosarcoma; hemangioendothelioma, malignant; Kaposi sarcoma; hemangiopericytoma, malignant; lymphangiosarcoma; osteosarcoma; juxtacortical osteosarcoma; chondrosarcoma; chondroblastoma, malignant; mesenchymal chondrosarcoma; giant cell tumor of bone; Ewing sarcoma; odontogenic tumor, malignant; ameloblastic odontosarcoma; ameloblastoma, malignant; ameloblastic fibrosarcoma; pinealoma, malignant; chordoma; glioma, malignant; ependymoma; astrocytoma; protoplasmic astrocytoma; fibrillary astrocytoma; astroblastoma; glioblastoma; oligodendroglioma; oligodendroblastoma; primitive neuroectodermal; cerebellar sarcoma; ganglioneuroblastoma; neuroblastoma; retinoblastoma; olfactory neurogenic tumor; meningioma, malignant; neurofibrosarcoma; neurilemmoma, malignant; granular cell tumor, malignant; malignant lymphoma; Hodgkin's disease; Hodgkin's lymphoma; paragranuloma; malignant lymphoma, small lymphocytic; malignant lymphoma, large cell, diffuse; malignant lymphoma, follicular; mycosis fungoides; other specified non-Hodgkin's lymphomas; malignant histiocytosis; multiple myeloma; mast cell sarcoma; immunoproliferative small intestinal disease; leukemia; lymphoid leukemia; plasma cell leukemia; erythroleukemia; lymphosarcoma cell leukemia; myeloid leukemia; basophilic leukemia; eosinophilic leukemia; monocytic leukemia; mast cell leukemia; megakaryoblastic leukemia; myeloid sarcoma; and hairy cell leukemia.

[0338] In some embodiments, the cancer is a breast cancer. In some embodiments, the cancer is colon cancer. In some embodiments, the cancer is gastric cancer. In some embodiments, the cancer is RCC. In another embodiment, the cancer is non-small cell lung cancer (NSCLC).

[0339] In some embodiments, solid cancer indications that can be treated with cells described herein (e.g., cells modified using methods of the disclosure, e.g., genetically modified iNK cells), either alone or in combination with one or more additional cancer treatment modality, include: bladder cancer, hepatocellular carcinoma, prostate cancer, ovarian/uterine cancer, pancreatic cancer, mesothelioma, melanoma, glioblastoma, HPV-associated and/or HPV-positive cancers such as cervical and HPV+ head and neck cancer, oral cavity cancer, cancer of the pharynx, thyroid cancer, gallbladder cancer, and soft tissue sarcomas. In some embodiments, hematological cancer indications that can be treated with cells described herein (e.g., cells modified using methods of the disclosure, e.g., genetically modified iNK cells), either alone or in combination with one or more additional cancer treatment modalities, include: ALL, CLL, NHL, DLBCL, AML, CML, and multiple myeloma (MM).

[0340] In some embodiments, examples of cellular proliferative and/or differentiative disorders of the lung that can be treated with cells described herein (e.g., cells modified using methods of the disclosure) include, but are not limited to, tumors such as bronchogenic carcinoma, including paraneoplastic syndromes, bronchioloalveolar carcinoma, neuroendocrine tumors, such as bronchial carcinoid, miscellaneous tumors, metastatic tumors, and pleural tumors, including solitary fibrous tumors (pleural fibroma) and malignant mesothelioma.

[0341] In some embodiments, examples of cellular proliferative and/or differentiative disorders of the breast that can be treated with cells described herein (e.g., cells modified using methods of the disclosure) include, but are not limited to, proliferative breast disease including, e.g., epithelial hyperplasia, sclerosing adenosis, and small duct papillomas; tumors, e.g., stromal tumors such as fibroadenoma, phyllodes tumor, and sarcomas, and epithelial tumors such as large duct papilloma; carcinoma of the breast including in situ (noninvasive) carcinoma that includes ductal carcinoma in situ (including Paget's disease) and lobular carcinoma in situ, and invasive (infiltrating) carcinoma including, but not limited to, invasive ductal carcinoma, invasive lobular carcinoma, medullary carcinoma, colloid (mucinous) carcinoma, tubular carcinoma, and invasive papillary carcinoma, and miscellaneous malignant neoplasms. Disorders in the male breast include, but are not limited to, gynecomastia and carcinoma.

[0342] In some embodiments, examples of cellular proliferative and/or differentiative disorders involving the colon that can be treated with cells described herein (e.g., cells modified using methods of the disclosure) include, but are not limited to, tumors of the colon, such as non-neoplastic polyps, adenomas, familial syndromes, colorectal carcinogenesis, colorectal carcinoma, and carcinoid tumors.

[0343] In some embodiments, examples of cancers or neoplastic conditions, in addition to the ones described above that can be treated with cells described herein (e.g., cells modified using methods of the disclosure), include, but are not limited to, a fibrosarcoma, myosarcoma, liposarcoma, chondrosarcoma, osteogenic sarcoma, chordoma, angiosarcoma, endotheliosarcoma, lymphangiosarcoma, lymphangioendotheliosarcoma, synovioma, mesothelioma, Ewing's tumor, leiomyosarcoma, rhabdomyosarcoma, gastric cancer, esophageal cancer, rectal cancer, pancreatic cancer, ovarian cancer, prostate cancer, uterine cancer, cancer of the head and neck, skin cancer, brain cancer, squamous cell carcinoma, sebaceous gland carcinoma, papillary carcinoma, papillary adenocarcinoma, cystadenocarcinoma, medullary carcinoma, bronchogenic carcinoma, renal cell carcinoma, hepatoma, bile duct carcinoma, choriocarcinoma, seminoma, embryonal carcinoma, Wilm's tumor, cervical cancer, testicular cancer, small cell lung carcinoma, non-small cell lung carcinoma, bladder carcinoma, epithelial carcinoma, glioma, astrocytoma, medulloblastoma, craniopharyngioma, ependymoma, pinealoma, hemangioblastoma, acoustic neuroma, oligodendroglioma, meningioma, melanoma, neuroblastoma, retinoblastoma, leukemia, lymphoma, or Kaposi sarcoma.

[0344] In some embodiments, cells described herein (e.g., cells modified using methods of the disclosure) are used in combination with one or more cancer treatment modalities. In some embodiments, other cancer treatment modalities include, but are not limited to: chemotherapeutic agents include alkylating agents such as thiotepa and CYTOXAN® cyclosphosphamide; alkyl sulfonates such as busulfan, improsulfan and piposulfan; aziridines such as benzodopa, carboquone, meturedopa, and uredopa; ethylenimines and methylamelamines including altretamine, triethylenemelamine, trietylenephosphoramide, triethiylenethiophosphoramide and trimethylolomelamine; acetogenins (especially bullatacin and bullatacinone); delta-9-tetrahydrocannabinol (dronabinol, MARINOL®); beta-lapachone; lapachol; colchicines; betulinic acid; a camptothecin (including the synthetic analogue topotecan (HYCAMTIN®), CPT-11 (irinotecan, CAMPTOSAR®), acetylcamptothecin, scopolectin, and 9-aminocamptothecin); bryostatin; callystatin; CC-1065 (including its adozelesin, carzelesin and bizelesin synthetic analogues); podophyllotoxin; podophyllinic acid; teniposide; cryptophycins (particularly cryptophycin 1 and cryptophycin 8); dolastatin; duocarmycin (including the synthetic analogues, KW-2189 and CB1-TM1); eleutherobin; pancratistatin; a sarcodictyin; spongistatin; nitrogen mustards such as chlorambucil, chlornaphazine, cholophosphamide, estramustine, ifosfanide, mechlorethamine, mechlorethamine oxide hydrochloride, melphalan, novembichin, phenesterine, prednimustine, trofosfamide, uracil mustard; nitrosureas such as carmustine, chlorozotocin, fotemustine, lomustine, nimustine, and ranimnustine; antibiotics such as the enediyne antibiotics (e.g., calicheamicin, especially calicheamicin gammalI and calicheamicin omegall (see, e.g., Agnew, Chem. Intl. Ed. Engl., 1994; 33:183-186); dynemicin, including dynemicin A; an esperamicin; as well as neocarzinostatin chromophore and related chromoprotein enediyne antiobiotic chromophores), aclacinomysins, actinomycin, authramycin, azaserine, bleomycins, cactinomycin, carabicin, caminomycin, carzinophilin, chromomycinis, dactinomycin, daunorubicin, detorubicin, 6-diazo-5-oxo-L-norleucine, doxorubicin (including ADRIAMYCIN®, morpholino-doxorubicin, cyanomorpholino-doxorubicin, 2-pyrrolino-doxorubicin, doxorubicin HCl liposome injection (DOXIL®) and deoxydoxorubicin), epirubicin, esorubicin, idarubicin, marcellomycin, mitomycins such as mitomycin C, mycophenolic acid, nogalamycin, olivomycins, peplomycin, potfiromycin, puromycin, quelamycin, rodorubicin, streptonigrin, streptozocin, tubercidin, ubenimex, zinostatin, zorubicin; anti-metabolites such as methotrexate, gemcitabine (GEMZAR®), tegafur (UFTORAL®), capecitabine (XELODA®), an epothilone, and 5-fluorouracil (5-FU); folic acid analogues such as denopterin, methotrexate, pteropterin, trimetrexate; purine analogs such as fludarabine, 6-mercaptopurine, thiamiprine, thioguanine; pyrimidine analogs such as ancitabine, azacitidine, 6-azauridine, carmofur, cytarabine, dideoxyuridine, doxifluridine, enocitabine, floxuridine; androgens such as calusterone, dromostanolone propionate, epitiostanol, mepitiostane, testolactone; anti-adrenals such as aminoglutethimide, mitotane, trilostane; folic acid replenisher such as frolinic acid; aceglatone; aldophosphamide glycoside; aminolevulinic acid; eniluracil; amsacrine; bestrabucil; bisantrene; edatraxate; defofamine; demecolcine; diaziquone; elformithine; elliptinium acetate; etoglucid; gallium nitrate; hydroxyurea; lentinan; lonidainine; maytansinoids such as maytansine and ansamitocins; mitoguazone; mitoxantrone; mopidanmol; nitraerine; pentostatin; phenamet; pirarubicin; losoxantrone; 2-ethylhydrazide; procarbazine; PSK® polysaccharide complex (JHS Natural Products, Eugene, Oreg.); razoxane; rhizoxin; sizofuran; spirogermanium; tenuazonic acid; triaziquone; 2,2′,2″-trichlorotriethylamine; trichothecenes (especially T-2 toxin, verracurin A, roridin A and anguidine); urethan; vindesine (ELDISINE®, FILDESIN®); dacarbazine; mannomustine; mitobronitol; mitolactol; pipobroman; gacytosine; arabinoside (“Ara-C”); thiotepa; taxoids, e.g., paclitaxel (TAXOL®), albumin-engineered nanoparticle formulation of paclitaxel (ABRAXANET™), and doxetaxel (TAXOTERE®); chloranbucil; 6-thioguanine; mercaptopurine; methotrexate; platinum analogs such as cisplatin and carboplatin; vinblastine (VELBAN®); platinum; etoposide (VP-16); ifosfamide; mitoxantrone; vincristine (ONCOVIN®); oxaliplatin; leucovovin; vinorelbine (NAVELBINE®); novantrone; edatrexate; daunomycin; aminopterin; cyclosporine, sirolimus, rapamycin, rapalogs, ibandronate; topoisomerase inhibitor RFS 2000; difluoromethylornithine (DMFO); retinoids such as retinoic acid; CHOP, an abbreviation for a combined therapy of cyclophosphamide, doxorubicin, vincristine, and prednisolone, and FOLFOX, an abbreviation for a treatment regimen with oxaliplatin (ELOXATIN™) combined with 5-FU, leucovovin; anti-estrogens and selective estrogen receptor modulators (SERMs), including, for example, tamoxifen (including NOLVADEX® tamoxifen), raloxifene (EVISTA®), droloxifene, 4-hydroxytamoxifen, trioxifene, keoxifene, LY117018, onapristone, and toremifene (FARESTON®); anti-progesterones; estrogen receptor down-regulators (ERDs); estrogen receptor antagonists such as fulvestrant (FASLODEX®); agents that function to suppress or shut down the ovaries, for example, leutinizing hormone-releasing hormone (LHRH) agonists such as leuprolide acetate (LUPRON® and ELIGARD®), goserelin acetate, buserelin acetate and tripterelin; other anti-androgens such as flutamide, nilutamide and bicalutamide; and aromatase inhibitors that inhibit the enzyme aromatase, which regulates estrogen production in the adrenal glands, such as, for example, 4(5)-imidazoles, aminoglutethimide, megestrol acetate (MEGASE®), exemestane (AROMASIN®), formestanie, fadrozole, vorozole (RIVISOR®), letrozole (FEMARA®), and anastrozole (ARIMIDEX®); bisphosphonates such as clodronate (for example, BONEFOS® or OSTAC®), etidronate (DIDROCAL®), NE-58095, zoledronic acid/zoledronate (ZOMETA®), alendronate (FOSAMAX®), pamidronate (AREDIA®), tiludronate (SKELID®), or risedronate (ACTONEL®); troxacitabine (a 1,3-dioxolane nucleoside cytosine analog); aptamers, described for example in U.S. Pat. No. 6,344,321, which is herein incorporated by reference in its entirety; anti HGF monoclonal antibodies (e.g., AV299 from Aveo, AMG102, from Amgen); truncated mTOR variants (e.g., CGEN241 from Compugen); protein kinase inhibitors that block mTOR induced pathways (e.g., ARQ197 from Arqule, XL880 from Exelexis, SGX523 from SGX Pharmaceuticals, MP470 from Supergen, PF2341066 from Pfizer); vaccines such as THERATOPE® vaccine and gene therapy vaccines, for example, ALLOVECTIN® vaccine, LEUVECTIN® vaccine, and VAXID® vaccine; topoisomerase 1 inhibitor (e.g., LURTOTECAN®); rmRH (e.g., ABARELIX®); lapatinib ditosylate (an ErbB-2 and EGFR dual tyrosine kinase small-molecule inhibitor also known as GW572016); COX-2 inhibitors such as celecoxib (CELEBREX®; 4-(5-(4-methylphenyl)-3-(trifluoromethyl)-1H-pyrazol-1-yl) benzenesulfonamide; and pharmaceutically acceptable salts, acids or derivatives of any of the above.

[0345] In some embodiments, cells described herein (e.g., cells modified using methods of the disclosure) are used in combination with one or more cancer treatment modalities that facilitate the induction of antibody dependent cellular cytotoxicity (ADCC) (see e.g., Janeway's Immunobiology by K. Murphy and C. weaver). In some embodiments, such a cancer treatment modality is an antibody, e.g., an antibody described herein. In some embodiments, cells described herein (e.g., cells modified using methods of the disclosure) are used in combination with one or more cancer treatment modalities that facilitate the induction of antibody dependent cellular cytotoxicity (ADCC), wherein the cancer treatment modality is an antibody or appropriate fragment thereof targeting CD20, TNFα, HER2, CD52, IgE, EGFR, VEGF-A, ITGA4, CTLA-4, CD30, VEGFR2, α4β7 integrin, CD19, CD3, PD-1, GD2, CD38, SLAMF7, PDGFRα, PD-L1, CD22, CD33, IFNγ, CD79β, or any combination thereof.

[0346] In some embodiments, cells described herein are utilized in combination with checkpoint inhibitors. Examples of suitable combination therapy checkpoint inhibitors include, but are not limited to, antagonists of PD-1 (Pdcdl, CD279), PDL-1 (CD274), TIM-3 (Havcr2), TIGIT (WUCAM and Vstm3), LAG-3 (Lag3, CD223), CTLA-4 (Ctla4, CD152), 2B4 (CD244), 4-1BB (CD137), 4-1BBL (CD137L), A2aR, BATE, BTLA, CD39 (Entpdl), CD47, CD73 (NT5E), CD94, CD96, CD160, CD200, CD200R, CD274, CEACAM1, CSF-1R, Foxp1, GARP, HVEM, IDO, EDO, TDO, LAIR-1, MICA/B, NR4A2, MAFB, OCT-2 (Pou2f2), retinoic acid receptor alpha (Rara), TLR3, VISTA, NKG2A/HLA-E, inhibitory KIR (for example, 2DL1, 2DL2, 2DL3, 3DL1, and 3DL2), or any suitable combination thereof.

[0347] In some embodiments, the antagonist inhibiting any of the above checkpoint molecules is an antibody. In some embodiments, the checkpoint inhibitory antibodies may be murine antibodies, human antibodies, humanized antibodies, a camel Ig, a shark heavychain-only antibody (VNAR), Ig NAR, chimeric antibodies, recombinant antibodies, or antibody fragments thereof. Non-limiting examples of antibody fragments include Fab, Fab′, F(ab)′2, F(ab)′3, Fv, single chain antigen binding fragments (scFv), (scFv)2, disulfide stabilized Fv (dsFv), minibody, diabody, triabody, tetrabody, single-domain antigen binding fragments (sdAb, Nanobody), recombinant heavy-chain-only antibody (VHH), and other antibody fragments that maintain the binding specificity of the whole antibody, which may be more cost-effective to produce, more easily used, or more sensitive than the whole antibody. In some embodiments, the one, or two, or three, or more checkpoint inhibitors comprise at least one of atezolizumab (anti-PDL1 mAb), avelumab (anti-PDL1 mAb), durvalumab (anti-PDL1 mAb), tremelimumab (anti-CTLA4 mAb), ipilimumab (anti-CTLA4 mAb), IPH4102 (anti-KIR), IPH43 (anti-MICA), IPH33 (anti-TLR3), lirimumab (anti-KIR), monalizumab (anti-NKG2A), nivolumab (anti-PD1 mAb), pembrolizumab (anti-PD 1 mAb), and any derivatives, functional equivalents, or biosimilars thereof.

[0348] In some embodiments, the antagonist inhibiting any of the above checkpoint molecules is microRNA-based, as many miRNAs are found as regulators that control the expression of immune checkpoints (Dragomir et al., Cancer Biol Med. 2018, 15(2): 103-115). In some embodiments, the checkpoint antagonistic miRNAs include, but are not limited to, miR-28, miR-15/16, miR-138, miR-342, miR-20b, miR-21, miR-130b, miR-34a, miR-197, miR-200c, miR-200, miR-17-5p, miR-570, miR-424, miR-155, miR-574-3p, miR-513, miR-29c, and/or any suitable combination thereof.

[0349] In some embodiments, cells described herein (e.g., cells modified using methods of the disclosure) are used in combination with one or more cancer treatment modalities such as exogenous interleukin (IL) dosing. In some embodiments, an exogenous IL provided to a patient is IL-15. In some embodiments, systemic IL-15 dosing when used in combination with cells described herein is reduced when compared to standard dosing concentrations (see e.g., Waldmann et al., IL-15 in the Combination Immunotherapy of Cancer. Front. Immunology, 2020).

[0350] Other compounds that are effective in treating cancer are known in the art and described herein that are suitable for use with the compositions and methods of the present disclosure as additional cancer treatment modalities are described, for example, in the “Physicians' Desk Reference, 62nd edition. Oradell, N.J.: Medical Economics Co., 2008”, Goodman & Gilman's “The Pharmacological Basis of Therapeutics, Eleventh Edition. McGraw-Hill, 2005”, “Remington: The Science and Practice of Pharmacy, 20th Edition. Baltimore, Md.: Lippincott Williams & Wilkins, 2000,” and “The Merck Index, Fourteenth Edition. Whitehouse Station, N.J.: Merck Research Laboratories, 2006”, incorporated herein by reference in relevant parts.

[0351] In some embodiments, a gene product of interest described herein is a recombinant polypeptide (e.g., a recombinant antibody, e.g., a therapeutic antibody), and a modified cell described herein can be used to produce such recombinant polypeptide. For example, in some embodiments, the present disclosure provides methods of producing a recombinant polypeptide (e.g., a recombinant antibody, e.g., a therapeutic antibody), comprising providing and/or generating a modified cell described herein (e.g., a cell modified to express a recombinant polypeptide (e.g., a recombinant antibody, e.g., a therapeutic antibody)), culturing the modified cell under conditions suitable for expression of the recombinant polypeptide (e.g., a recombinant antibody, e.g., a therapeutic antibody), and optionally harvesting the recombinant polypeptide (e.g., a recombinant antibody, e.g., a therapeutic antibody).

[0352] All publications, patents and patent applications cited herein, whether supra or infra, are hereby incorporated by reference in their entirety.

[0353] Throughout this specification, unless the context requires otherwise, the words “comprise”, “comprises” and “comprising” will be understood to imply the inclusion of a stated step or element or group of steps or elements but not the exclusion of any other step or element or group of steps or elements. By “consisting of is meant including, and limited to, whatever follows the phrase “consisting of:” Thus, the phrase “consisting of” indicates that the listed elements are required or mandatory, and that no other elements may be present. By “consisting essentially of” is meant including any elements listed after the phrase, and limited to other elements that do not interfere with or contribute to the activity or action specified in the disclosure for the listed elements. Thus, the phrase “consisting essentially” of indicates that the listed elements are required or mandatory, but that no other elements are optional and may or may not be present depending upon whether or not they affect the activity or action of the listed elements.

[0354] These and other changes can be made to the embodiments in light of the above-detailed description. In general, in the following claims, the terms used should not be construed to limit the claims to the specific embodiments disclosed in the specification and the claims, but should be construed to include all possible embodiments along with the full scope of equivalents to which such claims are entitled. Accordingly, the claims are not limited by the disclosure.

[0355] The various embodiments described above can be combined to provide further embodiments. All of the U.S. patents, U.S. patent application publications, U.S. patent applications, foreign patents, foreign patent applications and non-patent publications referred to in this specification and/or listed in the Application Data Sheet are incorporated herein by reference, in their entirety. The contents of database entries, e.g., NCBI nucleotide or protein database entries provided herein, are incorporated herein in their entirety. Where database entries are subject to change over time, the contents as of the filing date of the present application are incorporated herein by reference. Aspects of the embodiments can be modified, if necessary to employ concepts of the various patents, applications and publications to provide yet further embodiments.

[0356] The disclosure is further illustrated by the following examples. The examples are provided for illustrative purposes only. They are not to be construed as limiting the scope or content of the disclosure in any way.

### EXAMPLES

### Example 1: Screening of Guide RNAs for GAPDH

[0357] This example describes the screening of AsCpf1 (AsCas12a) guide RNAs that target the housekeeping gene GAPDH. GAPDH encodes Glyceraldehyde-3-Phosphate Dehydrogenase, an essential protein that catalyzes oxidative phosphorylation of glyceraldehyde-3-phosphate in the presence of inorganic phosphate and nicotinamide adenine dinucleotide (NAD), an important energy-yielding step in carbohydrate metabolism. The guide RNAs used in this analysis were all 41-mer RNA molecules with the following design: 5′-UAAUUUCUACUCUUGUAGAU-[21-mer targeting domain sequence]-3′ (SEQ ID NO: 90). For example, the guide RNA denoted RSQ22337 had the following sequence: 5′-UAAUUUCUACUCUUGUAGAUAUCUUCUAGGUAUGACAACGA-3′ (SEQ ID NO: 93) where the 21-mer targeting domain sequence is underlined. The guide RNAs with the targeting domain sequences shown in Table 14 were tested to determine how effective they were at editing GAPDH. Cas12a RNPs (RNPs having an engineered Cas12a (SEQ ID NO: 62)), containing each of these guide RNAs were transfected into iPSCs, and then editing levels were assayed three days after transfection (see e.g., Wong, K. G. et al. CryoPause: A New Method to Immediately Initiate Experiments after Cryopreservation of Pluripotent Stem Cells. Stem Cell Reports 9, 355-365 (2017)). The results are shown in FIG. 1 and FIG. 2. RSQ24570, RSQ24582, RSQ24589, RSQ24585, and RSQ22337 exhibited the greatest levels of measurable editing out of the GAPDH guides tested, editing approximately 70% or more of cells (about 92%, 89%, 88%, 87%, and 70%, respectively). It was observed that cells transfected with gRNAs targeting certain exonic regions yielded much lower amounts of isolatable genomic DNA (gDNA) for analyzing editing efficiency (at day 3 after transfection) when compared to cells transfected with gRNAs targeting intronic regions, indicating that that RNPs with certain exon-targeting gRNAs were cytotoxic to the cells. This suggested that cells edited with gRNAs targeting exonic regions could result in significant cell death due to the introduction of indels within GAPDH leading to expression of a non-functional GAPDH protein or a protein with insufficient function. It was postulated that it might be possible to use a rescue plasmid to repair the gRNA-mediated cleavage site in GAPDH while also knocking in a gene cargo of interest in frame with the repaired GAPDH via HDR, thereby rescuing those cells in which GAPDH is repaired and the cargo of interest is successfully integrated (as shown in FIG. 1 and FIG. 2). Those transfected cells that are edited (the majority of transfected cells, if a highly effective RNA-guided nucleases is used) but do not undergo HDR repair of GAPDH and do not integrate the cargo of interest die over time because they do not have a functioning GAPDH gene. Those cells carrying the cargo of interest would have an advantage due to a fully functioning GAPDH gene as the cells grow and divide, and these cells would be selected for over time. The expected end result would be a population of cells with a very high rate of cargo knock-in within the GAPDH locus.

[0358] The data in FIG. 2 suggested that while Cas12a RNP comprising RSQ22337 resulted in an editing level of approximately 70% at 3 days post-transfection, it caused slightly higher levels of toxicity than other exonic guides (RSQ24570, RSQ24582, RSQ24589, and RSQ24585) (see FIG. 2, only about 3.9 ng/μL of gDNA was isolated from edited cells). Thus, the actual editing efficiency was very likely significantly higher than 70%, as many cells had already died by 3 days post-transfection due to the lack of available rescue constructs and NHEJ forming toxic indels. As a result, RSQ22337 was chosen for further testing.

TABLE 14
Guide RNA sequences

| SEQ | | gRNA targeting domain sequence | |
|---|---|---|---|
| ID NO: | Name | (RNA) | Location |
| 94 | RSQ22336 | UGAGCCAGCCACCAGAGGGCG | Intron 8 |
| 95 | RSQ22337 | AUCUUCUAGGUAUGACAACGA | Intron 8/ Exon 9 (cut site |
| | | | in exon 9) |
| 96 | RSQ22338 | GCUACAGCAACAGGGUGGUGG | Exon 9 |
| 97 | RSQ24559 | CCAUAAUUUCCUUUCAAGGUG | Intron 7 |
| 98 | RSQ24560 | CUUUCAAGGUGGGGAGGGAGG | Intron 7 |
| 99 | RSQ24561 | AAGGUGGGGAGGGAGGUAGAG | Intron 7 |
| 100 | RSQ24562 | GCAGACCACAGUCCAUGCCAU | Exon 8 |
| 101 | RSQ24563 | CAGACCACAGUCCAUGCCAUC | Exon 8 |
| 102 | RSQ24564 | CCGGAGGGGCCAUCCACAGUC | Exon 8 |
| 103 | RSQ24565 | UAGACGGCAGGUCAGGUCCAC | Exon 8 |
| 104 | RSQ24566 | CUAGACGGCAGGUCAGGUCCA | Exon 8 |
| 105 | RSQ24567 | UCUAGACGGCAGGUCAGGUCC | Exon 8 |
| 106 | RSQ24568 | GCAGGUUUUUCUAGACGGCAG | Exon 8 |
| 107 | RSQ24569 | UCAAGCUCAUUUCCUGGUAUG | Exon 8 |
| 108 | RSQ24570 | CUGGUAUGUGGCUGGGGCCAG | Exon 8/ Intron 8 (cut site |
| | | | in intron 8) |
| 109 | RSQ24571 | AGAGCCAGUCUCUGGCCCCAG | Intron 8 |
| 110 | RSQ24572 | AAGAGCCAGUCUCUGGCCCCA | Intron 8 |
| 111 | RSQ24573 | UAAGAGCCAGUCUCUGGCCCC | Intron 8 |
| 112 | RSQ24574 | CUGAGCCAGCCACCAGAGGGC | Intron 8 |
| 113 | RSQ24575 | UCUGAGCCAGCCACCAGAGGG | Intron 8 |
| 114 | RSQ24576 | CAUCUUCUAGGUAUGACAACG | Exon 9 |
| 115 | RSQ24578 | UUGAUGGUACAUGACAAGGUG | 1kb_downstream |
| 116 | RSQ24579 | GAGGCCCUACCCUCAGUCUGA | 1kb_downstream |
| 117 | RSQ24580 | CCUCUCCUCGCUCCAGUCCUA | 1kb_downstream |
| 118 | RSQ24581 | CUCUCCUCGCUCCAGUCCUAG | 1kb_downstream |
| 119 | RSQ24582 | GCCAACAGCAGAUAGCCUAGG | 1kb_downstream |
| 120 | RSQ24583 | UGUGCCCUCGUGUCUUAUCUG | 1kb_downstream |
| 121 | RSQ24584 | CCUAGAUGAAUCCUGCUUGAA | 1kb_downstream |
| 122 | RSQ24585 | GGUACUUGGUUUACCUAGAUG | 1kb_downstream |
| 123 | RSQ24586 | AGGUACUUGGUUUACCUAGAU | 1kb_downstream |
| 124 | RSQ24587 | AAACAUUAUAUAGUCCUUACC | 1kb_downstream |
| 125 | RSQ24588 | UAAACAUUAUAUAGUCCUUAC | 1kb_downstream |
| 126 | RSQ24589 | CCGAUUUUUAAACAUUAUAUA | 1kb_downstream |
| 127 | RSQ24590 | ACCGAUUUUUAAACAUUAUAU | 1kb_downstream |
| 128 | RSQ24591 | UACCGAUUUUUAAACAUUAUA | 1kb_downstream |
| 129 | RSQ24592 | AAAAUCGGUAAAAAUGCCCAC | 1kb_downstream |
| 130 | RSQ24593 | GAGGAAGAUGAACUGAGAUGU | 1kb_downstream |
| 131 | RSQ24594 | AGGAAGAUGAACUGAGAUGUG | 1kb_downstream |

### Example 2: Knock-In of Cargo at Essential Gene Locus of B Cells

[0359] The present example describes use of the gene editing methods described herein comprising viral vector transduction of a B cell population.

[0360] B cells were thawed as known in the art and cultured for 48 hours prior to electroporation. In brief, for electroporation, 1,000,000 B cells were suspended in P3 buffer per well in a Lonza 96-well nucleofector and electroporated with RNP comprising gRNA RSQ22337 (SEQ ID NO: 95) and Cas12a (SEQ ID NO: 62) targeting the GAPDH gene. Appropriate media was added to cells immediately after electroporation and cells were allowed to recover. After plating into a 24 well plate, AAV6 comprising donor template was added at 1.25×10¹⁰ viral genomes (VG)/ml virus. The donor template was designed as described herein, with a 5′ codon-optimized coding portion of GAPDH exon 9 optimized to prevent further binding of the gRNA targeting domain sequence of the guide RNA (RSQ22337)), an in-frame sequence encoding the P2A self-cleaving peptide (“P2A”), an in-frame coding sequence for GFP (“Cargo”), a stop codon, and a polyA signal sequence. Cells were cultured for 7 days and media was refreshed every 2 days to maintain a cell density of 5×10⁵ cells/ml.

[0361] Successful transduction, editing, knock-in cassette integration, and/or expression events were determined using flow cytometry at 7 days post-electroporation, as described herein. Following AAV transduction, a large proportion of the cells are edited at the GAPDH locus by the RNP and have integrated the knock-in cassette via HDR. As seen in FIG. 4A, control cells that received only the AAV6 comprising the donor template (e.g., cells that did not receive the GAPDH targeting RNP) did not display GFP expression. In contrast, as depicted in FIG. 4B, a high proportion (˜96.8%) of cells were observed via flow cytometry to have GFP expression following AAV transduction. Further flow cytometry showed that a high proportion (˜97.0%) of cells expressed both the B cell marker CD19 and GFP (FIG. 5B) while ˜100% of unedited wild-type B cells displayed only CD19 expression and not GFP (FIG. 5A). Thus, the methods described herein can be used to generate and isolate a population of modified B cells that highly express a gene of interest (here represented by GFP) relative to other gene knock-in methods.

### Example 3: Simultaneous Knockout of Genes in B Cells and Knock-In of Cargo at Essential Gene Locus of B Cells

[0362] The present example describes use of the gene editing methods described herein comprising viral vector transduction of a B cell population.

[0363] CD19+ B cells were thawed using standard methods and cultured for 48 hours prior to electroporation. In brief, for electroporation, 500,000 B cells were suspended in P3 buffer per well in a Lonza 96-well nucleofector and electroporated with RNP comprising a gRNA (SEQ ID NO: 2000) targeting the B2M gene, either gRNA #1 (SEQ ID NO: 2001) or gRNA #2 (SEQ ID NO: 2002) targeting the CIITA gene, and RSQ22337 (SEQ ID NO: 95) targeting the GAPDH gene and Cas12a (SEQ ID NO: 62). Appropriate media was added to cells immediately after electroporation and cells were allowed to recover. After plating into a 12 well plate, AAV6 comprising donor template was added at 1.5×10⁵ MOI. The donor template was designed as described herein, with a 5′ codon-optimized coding portion of GAPDH exon 9 optimized to prevent further binding of the gRNA targeting domain sequence of the guide RNA (RSQ22337)), an in-frame sequence encoding the P2A self-cleaving peptide (“P2A”), an in-frame coding sequence for a HLA-E transgenic polypeptide as described in WO 2022/272292 (“Cargo”), a stop codon, and a polyA signal sequence. Cells were cultured for 7 days and media was refreshed every 2 days.

TABLE 15
Guide RNA sequences

| SEQ | | gRNA targeting |
|---|---|---|
| ID NO: | Gene | domain sequence (RNA) |
| 2000 | B2M | AGTGGGGGTGAATTCAGTGTA |
| 2001 | CIITA | TCTGCAGCCTTCCCAGAGGA |
| 2002 | CIITA | TGCCCAACTTCTGCTGGCATC |

[0364] Successful transduction, editing, knock-in cassette integration, and/or expression events were determined using flow cytometry at 7 days post-electroporation, as described herein. Examination of the resulting cells confirmed that the methods described herein were capable of editing a large proportion of B cells. As shown in the left plot in FIG. 6, a high proportion (˜95.5%) of cells were observed via flow cytometry to comprise B2M/CIITA double knockout (DKO). Of these B2M/CIITA DKO B cells, a high proportion (˜90.5%) of cells expressed the HLA-E transgenic polypeptide (center plot, FIG. 6). Meanwhile, unedited control B cells did not display any detectable expression of the HLA-E transgenic polypeptide (right plot, FIG. 6). Additional analysis confirmed robust editing of B cells as up to at least 95% efficiency was achieved for the B2M/CIITA DKO and up to at least 90% efficiency was achieved for the HLA-E transgenic construct knock-in (FIG. 7). Robust editing was observed using two different CIITA gRNAs (SEQ ID NO: 2001 and SEQ ID NO: 2002) and at a range of RNP concentrations (1 uM, 2 uM, 4 uM). These results confirm that methods described herein can be used to simultaneously perform multiple genomic edits—including knockouts and knock-ins—in B cells, and can produce populations of modified B cells exhibiting high expression levels of a gene of interest.

### EQUIVALENTS

[0365] It is to be understood that while the disclosure has been described in conjunction with the detailed description thereof, the foregoing description is intended to illustrate and not limit the scope of the present disclosure, which is defined by the scope of the appended claims. Other aspects, advantages, and modifications are within the scope of the following claims.

We claim:

1. A method of editing the genome of a B cell, the method comprising contacting the cell with:
(i) a nuclease that causes a break within an endogenous coding sequence of an essential gene in the B cell, and
(ii) a donor template that comprises a knock-in cassette comprising an exogenous coding sequence for a gene product of interest in frame with and downstream (3′) of an exogenous coding sequence or partial coding sequence of the essential gene, wherein the knock-in cassette is integrated into the genome of the B cell by homology-directed repair (HDR) of the break, resulting in a genome-edited B cell that expresses:
(a) the gene product of interest, and
(b) the gene product encoded by the essential gene, or a functional variant thereof.

2. The method of claim 1, wherein, if the knock-in cassette is not integrated into the genome of the B cell by homology-directed repair (HDR) in the correct position or orientation, the B cell no longer expresses the gene product encoded by the essential gene, or a functional variant thereof.

3. The method of claim 1 or 2, wherein the break is a double-strand break.

4. The method of any one of claims 1-3, wherein the break is located within the last 1000, 500, 400, 300, 200, 100, or 50 base pairs of the endogenous coding sequence of the essential gene.

5. The method of any one of claims 1-4, wherein the break is located within the last exon of the essential gene.

6. The method of any one of claims 1-5, wherein the nuclease is a CRISPR/Cas nuclease and the method further comprises contacting the B cell with a guide molecule for the CRISPR/Cas nuclease.

7. The method of any one of claims 1-5, wherein the nuclease is a zinc finger nuclease (ZFN), a transcription activator-like effector nuclease (TALEN) or a meganuclease.

8. The method of any one of claims 1-7, wherein the donor template is a donor DNA template, optionally wherein the donor DNA template is double-stranded.

9. The method of claim 8, wherein the donor DNA template is a plasmid, optionally wherein the plasmid has not been linearized.

10. The method of any one of claims 1-9, wherein the donor template comprises homology arms on either side of the knock-in cassette.

11. The method of claim 10, wherein the homology arms correspond to sequences located on either side of the break in the genome of the B cell.

12. The method of any one of claims 1-11, wherein the knock-in cassette comprises a regulatory element that enables expression of the gene product encoded by the essential gene and the gene product of interest as separate gene products, optionally, wherein at least one of the gene products is a protein and the regulatory element enables expression of that protein separate from the other gene product.

13. The method of claim 12, wherein the knock-in cassette comprises an IRES or 2A element located between the exogenous coding sequence or partial coding sequence of the essential gene and the exogenous coding sequence for the gene product of interest.

14. The method of claim 13, wherein the 2A element is a T2A element (EGRGSLLTCGDVEENPGP), a P2A element (ATNFSLLKQAGDVEENPGP), a E2A element (QCTNYALLKLAGDVESNPGP), or an F2A element (VKQTLNFDLLKLAGDVESNPGP).

15. The method of claim 13 or 14, wherein the knock-in cassette further comprises a sequence encoding a linker peptide upstream of the 2A element.

16. The method of claim 15, wherein the linker peptide comprises the amino acid sequence GSG.

17. The method of any one of claims 1-16, wherein the knock-in cassette comprises a polyadenylation sequence, and optionally a 3′ UTR sequence, downstream of the exogenous coding sequence for the gene product of interest, wherein, if a 3′UTR sequence is present, the 3′UTR sequence is positioned 3′ of the exogenous coding sequence and 5′ of the polyadenylation sequence.

18. The method of any one of claims 1-17, wherein the exogenous partial coding sequence of the essential gene in the knock-in cassette encodes a C-terminal fragment of a protein encoded by the essential gene.

19. The method of claim 18, wherein the C-terminal fragment is less than 500, 250, 150, 125, 100, 75, 50, 25, 20, 15 or 10 amino acids in length.

20. The method of claim 18 or 19, wherein the C-terminal fragment includes an amino acid sequence that is encoded by a region of the endogenous coding sequence of the essential gene that spans the break.

21. The method of any one of claims 1-20, wherein the exogenous coding sequence or partial coding sequence of the essential gene in the knock-in cassette is less than 100% identical to the corresponding endogenous coding sequence of the essential gene of the B cell.

22. The method of claim 21, wherein the exogenous coding sequence or partial coding sequence of the essential gene in the knock-in cassette has been codon optimized relative to the corresponding endogenous coding sequence of the essential gene of the B cell to prevent further binding of the nuclease to the target site, to reduce the likelihood of recombination after integration of the knock-in cassette into the genome of the B cell, and/or to increase expression of the gene product of the essential gene and/or the gene product of interest after integration of the knock-in cassette into the genome of the B cell.

23. The method of any one of claims 1-22, wherein the essential gene is a housekeeping gene, e.g., a gene listed in Table 3.

24. The method of any one of claims 1-22, wherein the B cell is a progenitor B cell, Pre B cell, Pro B cell, an immature B cell, a transitional B cell, a mature B cell, a naïve B cell, memory B cell, a marginal zone B cell, a follicular B cell, a germinal center B cell, or plasma B cell.

25. The method of any one of claims 1-24, wherein the donor template does not comprise a reporter gene, e.g., a fluorescent reporter gene or an antibiotic resistance gene.

26. A genetically modified B cell comprising a genome with an exogenous coding sequence for a gene product of interest in frame with and downstream (3′) of a coding sequence of an essential gene.

27. An engineered cell comprising a genomic modification, wherein the genomic modification comprises an insertion of an exogenous knock-in cassette within an endogenous coding sequence of an essential gene in the B cell's genome, wherein the knock-in cassette comprises an exogenous coding sequence for a gene product of interest in frame with and downstream (3) of an exogenous coding sequence or partial coding sequence encoding the gene product of the essential gene, or a functional variant thereof, and wherein the B cell expresses the gene product of interest and the gene product encoded by the essential gene, or a functional variant thereof, optionally wherein the gene product of interest and the gene product encoded by the essential gene are expressed from the endogenous promoter of the essential gene.

28. The B cell of claim 26 or 27, wherein the cell's genome comprises a regulatory element that enables expression of the gene product encoded by the essential gene and the gene product of interest as separate gene products, optionally, wherein at least one of the gene products is a protein and the regulatory element enables expression of that protein separate from the other gene product.

29. The cell of claim 28, wherein the B cell's genome comprises an IRES or 2A element located between the coding sequence of the essential gene and the exogenous coding sequence for the gene product of interest.

30. The cell of any one of claims 26-29, wherein the B cell's genome comprises a polyadenylation sequence, and optionally a 3′ UTR sequence, downstream of the exogenous coding sequence for the gene product of interest, wherein, if a 3′UTR sequence is present, the 3′UTR sequence is positioned 3′ of the exogenous coding sequence and 5′ of the polyadenylation sequence.

31. The B cell of any one of claims 26-30, wherein the coding sequence of the essential gene is less than 100% identical to an endogenous coding sequence of the essential gene.

32. The B cell of any one of claims 26-31, wherein the essential gene is a housekeeping gene, e.g., a gene listed in Table 3.

33. The B cell of claim 26-32, wherein the B cell is a progenitor B cell, Pre B cell, Pro B cell, an immature B cell, a transitional B cell, a mature B cell, a naïve B cell, memory B cell, a marginal zone B cell, a follicular B cell, a germinal center B cell, or plasma B cell.

34. The B cell of any one of claims 26-33, wherein the B cell's genome does not comprise a reporter gene, e.g., a fluorescent reporter gene or an antibiotic resistance gene.

35. The B cell of any one of claims 26-34, for use as a medicament.

36. The B cell of any one of claims 26-34, for use in the treatment of a disease, disorder, or condition, e.g., a cancer.

37. A B cell, or population of B cells, produced by the method of any one of claims 1-25 or progeny thereof.

38. A system for editing the genome of a B cell, the system comprising the B cell, a nuclease that causes a break within an endogenous coding sequence of an essential gene of the B cell, and a donor template that comprises a knock-in cassette comprising an exogenous coding sequence for a gene product of interest in frame with and downstream (3′) of an exogenous coding sequence or partial coding sequence of the essential gene.

39. The system of claim 38, wherein the break is a double-strand break.

40. The system of claim 38 or 39, wherein the break is located within the last 1000, 500, 400, 300, 200, 100 or 50 base pairs of the coding sequence of the essential gene.

41. The system of any one of claims 38-40, wherein the break is located within the last exon of the essential gene.

42. The system of any one of claims 38-41, wherein the nuclease is a CRISPR/Cas nuclease and the system further comprises a guide molecule for the CRISPR/Cas nuclease.

43. The system of any one of claims 38-41, wherein the nuclease is a zinc finger nuclease (ZFN), a transcription activator-like effector nuclease (TALEN) or a meganuclease.

44. The system of any one of claims 38-43, wherein the donor template is a donor DNA template, optionally wherein the donor DNA template is double-stranded.

45. The system of claim 44, wherein the donor DNA template is a plasmid, optionally wherein the plasmid has not been linearized.

46. The system of any one of claims 38-45, wherein the donor template comprises homology arms on either side of the knock-in cassette.

47. The system of claim 46, wherein the homology arms correspond to sequences located on either side of the break in the genome of the B cell.

48. The system of any one of claims 38-47, wherein the knock-in cassette comprises a regulatory element that enables expression of the gene product encoded by the essential gene and the gene product of interest as separate gene products, optionally, wherein at least one of the gene products is a protein and the regulatory element enables expression of that protein separate from the other gene product.

49. The system of claim 48, wherein the knock-in cassette comprises an IRES or 2A element located between the exogenous coding sequence or partial coding sequence of the essential gene and the exogenous coding sequence for the gene product of interest.

50. The system of any one of claims 38-49, wherein the knock-in cassette comprises a polyadenylation sequence, and optionally a 3′ UTR sequence, downstream of the exogenous coding sequence for the gene product of interest, wherein, if a 3′UTR sequence is present, the 3′UTR sequence is positioned 3′ of the exogenous coding sequence and 5′ of the polyadenylation sequence.

51. The system of any one of claims 38-50, wherein the exogenous partial coding sequence of the essential gene in the knock-in cassette encodes a C-terminal fragment of a protein encoded by the essential gene.

52. The system of claim 51, wherein the C-terminal fragment is less than 500, 250, 150, 125, 100, 75, 50, 25, 20, 15 or 10 amino acids in length.

53. The system of claim 51 or 52, wherein the C-terminal fragment includes an amino acid sequence that is encoded by a region of the coding sequence of the essential gene that spans the break.

54. The system of any one of claims 38-53, wherein the exogenous coding sequence or partial coding sequence of the essential gene in the knock-in cassette is less than 100% identical to the corresponding endogenous coding sequence of the essential gene of the cell.

55. The system of claim 54, wherein the exogenous coding sequence or partial coding sequence of the essential gene in the knock-in cassette has been codon optimized relative to the corresponding endogenous coding sequence of the essential gene of the B cell to prevent further binding of a nuclease to the target site, to reduce the likelihood of recombination after integration of the knock-in cassette into the genome of the B cell, or to increase expression of the gene product of the essential gene and/or the gene product of interest after integration of the knock-in cassette into the genome of the B cell.

56. The system of claim 55, wherein the exogenous coding sequence or partial coding sequence of the essential gene in the knock-in cassette does not comprise a target site for the nuclease.

57. The system of any one of claims 38-56, wherein the essential gene is a housekeeping gene, e.g., a gene listed in Table 3.

58. The system of any one of claims 38-57, wherein the B cell is progenitor B cell, Pre B cell, Pro B cell, an immature B cell, a transitional B cell, a mature B cell, a naïve B cell, memory B cell, a marginal zone B cell, a follicular B cell, a germinal center B cell, or plasma B cell.

59. The system of any one of claims 38-58, wherein the donor DNA template does not comprise a reporter gene, e.g., a fluorescent reporter gene or an antibiotic resistance gene.

The application's sequence listing, which the Patent Office published only in electronic form, follows.

SEQUENCE LISTING (2007 sequences)

SEQ ID NO: 1 - DNA, 555 bp, synthetic construct
  source 1..555: mol_type = other DNA
gaagactgtggatggcccctccgggaaactgtggcgtgatggccgcggggctctccagaacatcatccctgcctctactggcgctgccaaggctgtgggcaaggtcatccctgagctgaacgggaagctcactggcatggccttccgtgtccccactgccaacgtgtcagtggtggacctgacctgccgtctagaaaaacctgccaaatatgatgacatcaagaaggtggtgaagcaggcgtcggagggccccctcaagggcatcctgggctacactgagcaccaggtggtctcctctgacttcaacagcgacacccactcctccacctttgacgctggggctggcattgccctcaacgaccactttgtcaagctcatttcctggtatgtggctggggccagagactggctcttaaaaagtgcagggtctggcgccctctggtggctggctcagaaaaagggccctgacaactctttacatcttctaggtatgacaacgagttcggatatagcaatagagtggtcgatctgatggctcatatggctagcaaagag

SEQ ID NO: 2 - DNA, 621 bp, synthetic construct
  source 1..621: mol_type = other DNA
gaagactgtggatggcccctccgggaaactgtggcgtgatggccgcggggctctccagaacatcatccctgcctctactggcgctgccaaggctgtgggcaaggtcatccctgagctgaacgggaagctcactggcatggccttccgtgtccccactgccaacgtgtcagtggtggacctgacctgccgtctagaaaaacctgccaaatatgatgacatcaagaaggtggtgaagcaggcgtcggagggccccctcaagggcatcctgggctacactgagcaccaggtggtctcctctgacttcaacagcgacacccactcctccacctttgacgctggggctggcattgccctcaacgaccactttgtcaagctcatttcctggtatgtggctggggccagagactggctcttaaaaagtgcagggtctggcgccctctggtggctggctcagaaaaagggccctgacaactctttacatcttctaggtatgacaacgagttcggatatagcaatagagtggtcgatctgatggctcatatggctagcaaagagggaagcggagctactaacttcagcctgctgaagcaggctggagacgtggaggagaaccctggacct

SEQ ID NO: 3 - DNA, 567 bp, synthetic construct
  source 1..567: mol_type = other DNA
ggctttcccataatttcctttcaaggtggggagggaggtagaggggtgatgtggggagtacgctgcagggcctcactccttttgcagaccacagtccatgccatcactgccacccagaagactgtggatggcccctccgggaaactgtggcgtgatggccgcggggctctccagaacatcatccctgcctctactggcgctgccaaggctgtgggcaaggtcatccctgagctgaacgggaagctcactggcatggccttccgtgtccccactgccaacgtgtcagtggtggacctgacctgccgtctagaaaaacctgccaaatatgatgacatcaagaaggtggtgaagcaggcgtcggagggccccctcaagggcatcctgggctacactgagcaccaggtggtctcctctgacttcaacagcgacacccactcctccacctttgacgctggggctggcattgccctcaacgaccactttgtcaagctcatctcttggtacgacaatgagttcggatatagcaatagagtggtcgatctgatggctcatatggctagcaaagag

SEQ ID NO: 4 - DNA, 500 bp, synthetic construct
  source 1..500: mol_type = other DNA
atttggctacagcaacagggtggtggacctcatggcccacatggcctccaaggagtaagacccctggaccaccagccccagcaagagcacaagaggaagagagagaccctcactgctggggagtccctgccacactcagtcccccaccacactgaatctcccctcctcacagttgccatgtagaccccttgaagaggggaggggcctagggagccgcaccttgtcatgtaccatcaataaagtaccctgtgctcaaccagttacttgtcctgtcttattctagggtctggggcagaggggagggaagctgggcttgtgtcaaggtgagacattcttgctggggagggacctggtatgttctcctcagactgagggtagggcctccaaacagccttgcttgcttcgagaaccatttgcttcccgctcagacgtcttgagtgctacaggaagctggcaccactacttcagagaacaaggccttttcctctcctcgctccagt

SEQ ID NO: 5 - DNA, 500 bp, synthetic construct
  source 1..500: mol_type = other DNA
agactggctcttaaaaagtgcagggtctggcgccctctggtggctggctcagaaaaagggccctgacaactcttttcatcttctaggtatgacaacgaatttggctacagcaacagggtggtggacctcatggcccacatggcctccaaggagtaagacccctggaccaccagccccagcaagagcacaagaggaagagagagaccctcactgctggggagtccctgccacactcagtcccccaccacactgaatctcccctcctcacagttgccatgtagaccccttgaagaggggaggggcctagggagccgcaccttgtcatgtaccatcaataaagtaccctgtgctcaaccagttacttgtcctgtcttattctagggtctggggcagaggggagggaagctgggcttgtgtcaaggtgagacattcttgctggggagggacctggtatgttctcctcagactgagggtagggcctccaaacagccttgcttgct

SEQ ID NO: 6 - DNA, 562 bp, synthetic construct
  source 1..562: mol_type = other DNA
gcagacttccatttacagtgaggaggtgagcattgcattgaacaaaagatggcgttttcacttggaattagttatctgaagctttaggattcctcagcaatatgattatgagacaagaaaggaagattcagaaatgagtctagttgaaggcagcaattcagagaagaagattcagttgttatcattgccgtcctgcttggtttatggcctggttcaggaccaaggagagaagtgtgaatacatgcctcttgagctatagaatgagacgctggagtcactaagatgattttttaaaagtattgttttataaacaaaaataagattgtgacaagggattccactattaatgttttcatgcctgtgccttaatctgactgggtatggtgagaattgtgcttgcagctttaaggtaagaattttaccatcttaatatgttaagaagtgccatttcagtctctcatctctactccaacttgtcttcttaggtgctaaagtcagagccgaaatctacgaggccttcgagaacatctaccccatcctgaagggcttcagaaagaccacc

SEQ ID NO: 7 - DNA, 580 bp, synthetic construct
  source 1..580: mol_type = other DNA
ctgaccacagctctgcaagcagacttccatttacagtgaggaggtgagcattgcattgaacaaaagatggcgttttcacttggaattagttatctgaagctttaggattcctcagcaatatgattatgagacaagaaaggaagattcagaaatgagtctagttgaaggcagcaattcagagaagaagattcagttgttatcattgccgtcctgcttggtttatggcctggttcaggaccaaggagagaagtgtgaatacatgcctcttgagctatagaatgagacgctggagtcactaagatgattttttaaaagtattgttttataaacaaaaataagattgtgacaagggattccactattaatgttttcatgcctgtgccttaatctgactgggtatggtgagaattgtgcttgcagctttaaggtaagaattttaccatcttaatatgttaagaagtgccatttcagtctctcatctctactccaacttgtcttcttaggggctaaagtgcgggccgagatctacgaggccttcgagaatatctaccccatcctgaagggcttcagaaagaccacc

SEQ ID NO: 8 - DNA, 521 bp, synthetic construct
  source 1..521: mol_type = other DNA
acaaaagatggcgttttcacttggaattagttatctgaagctttaggattcctcagcaatatgattatgagacaagaaaggaagattcagaaatgagtctagttgaaggcagcaattcagagaagaagattcagttgttatcattgccgtcctgcttggtttatggcctggttcaggaccaaggagagaagtgtgaatacatgcctcttgagctatagaatgagacgctggagtcactaagatgattttttaaaagtattgttttataaacaaaaataagattgtgacaagggattccactattaatgttttcatgcctgtgccttaatctgactgggtatggtgagaattgtgcttgcagctttaaggtaagaattttaccatcttaatatgttaagaagtgccatttcagtctctcatctctactccaacttgtcttcttaggtgctaaagtcagagcagaaatttatgaagcattcgagaacatctaccctattctaaagggattcaggaagacgacg

SEQ ID NO: 9 - DNA, 500 bp, synthetic construct
  source 1..500: mol_type = other DNA
cagaaatttatgaagcatttgaaaacatctaccctattctaaagggattcaggaagacgacgtaatggctctcatgtacccttgcctcccccacccccttctttttttttttttaaacaaatcagtttgttttggtacctttaaatggtggtgttgtgagaagatggatgttgagttgcagggtgtggcaccaggtgatgcccttctgtaagtgcccaccgcgggatgccgggaaggggcattatttgtgcactgagaacaccgcgcagcgtgactgtgagttgctcataccgtgctgctatctgggcagcgctgcccatttatttatatgtagattttaaacactgctgttgacaagttggtttgagggagaaaactttaagtgttaaagccacctctataattgattggactttttaattttaatgtttttccccatgaaccacagtttttatatttctaccagaaaagtaaaaatcttttttaaaagtgttgttttt

SEQ ID NO: 10 - DNA, 500 bp, synthetic construct
  source 1..500: mol_type = other DNA
taggtgctaaagtcagagcagaaatttatgaagcatttgaaaacatctaccctattctaaagggattcaggaagacgacgtaatggctctcatgtacccttgcctcccccacccccttctttttttttttttaaacaaatcagtttgttttggtacctttaaatggtggtgttgtgagaagatggatgttgagttgcagggtgtggcaccaggtgatgcccttctgtaagtgcccaccgcgggatgccgggaaggggcattatttgtgcactgagaacaccgcgcagcgtgactgtgagttgctcataccgtgctgctatctgggcagcgctgcccatttatttatatgtagattttaaacactgctgttgacaagttggtttgagggagaaaactttaagtgttaaagccacctctataattgattggactttttaattttaatgtttttccccatgaaccacagtttttatatttctaccagaaaagtaaaaatcttt

SEQ ID NO: 11 - DNA, 500 bp, synthetic construct
  source 1..500: mol_type = other DNA
aagggattcaggaagacgacgtaatggctctcatgtacccttgcctcccccacccccttctttttttttttttaaacaaatcagtttgttttggtacctttaaatggtggtgttgtgagaagatggatgttgagttgcagggtgtggcaccaggtgatgcccttctgtaagtgcccaccgcgggatgccgggaaggggcattatttgtgcactgagaacaccgcgcagcgtgactgtgagttgctcataccgtgctgctatctgggcagcgctgcccatttatttatatgtagattttaaacactgctgttgacaagttggtttgagggagaaaactttaagtgttaaagccacctctataattgattggactttttaattttaatgtttttccccatgaaccacagtttttatatttctaccagaaaagtaaaaatcttttttaaaagtgttgtttttctaatttataactcctaggggttatttctgtgccagacaca

SEQ ID NO: 12 - DNA, 522 bp, synthetic construct
  source 1..522: mol_type = other DNA
ggcccgggggactccacatggtggcaggcagtggcatcagcaagacactctctccctcacagaacgtgaagctccctgacgcctatgagcgcctcatcctggacgtcttctgcgggagccagatgcacttcgtgcgcaggtgaggcccagctgccggcccctgcatacctgtgggctatggggtggcctttgccctccctccctgtgtgccaccggcctcccaagccataccatgtcccctcagcgacgagctccgtgaggcctggcgtattttcaccccactgctgcaccagattgagctggagaagcccaagcccatcccctatatttatggcaggtgaggaaagggtgggggctggggacagagcccagcgggcaggggcggggtgagggtggagctacctcatgcctctcctccacccgtcactctccagccgaggccccacggaggcagacgagctgatgaagagagtgggcttccagtacgagggaacctacaaatgggtcaaccctcacaagctg

SEQ ID NO: 13 - DNA, 500 bp, synthetic construct
  source 1..500: mol_type = other DNA
gtgggtgaacccccacaagctctgagccctgggcacccacctccacccccgccacggccaccctccttcccgccgcccgaccccgagtcgggaggactccgggaccattgacctcagctgcacattcctggccccgggctctggccaccctggcccgcccctcgctgctgctactacccgagcccagctacattcctcagctgccaagcactcgagaccatcctggcccctccagaccctgcctgagcccaggagctgagtcacctcctccactcactccagcccaacagaaggaaggaggagggcgcccattcgtctgtcccagagcttattggccactgggtctcactcctgagtggggccagggtgggagggagggacgagggggaggaaaggggcgagcacccacgtgagagaatctgcctgtggccttgcccgccagcctcagtgccacttgacattccttgtcaccagcaacatctcgagccccctggatgtcc

SEQ ID NO: 14 - DNA, 587 bp, synthetic construct
  source 1..587: mol_type = other DNA
ccagggggctgtagtggggccaggctggacctctgtgccctgagcatggctttcttgtttttcagttttggaactccccaaagagctgtcagaaatctttgatcccacacgaggtaggctgctgcattcctccctgaggctaggggtaagggacacagctcattgggtcctatggctgttttcttgcccttttgaggaccttgttgtggcgcttatggtaactggggcaaagggtgaagttcctgatgggcaggtggggttccctttcctgggctttggtgggtggagaggtgggagctggaatgttagtaactgagctccctccattcccagagtgcatgagctcggagctgctggaggagttgatgtcctcagaaggtgggtggccctggaaggtgggagtgggtgtgggcaggggttgggctgctgctaggggagccctggcccagggcctgagactagtgctctctgcagtgttcgcccctctgctgagactttctcctcctcctggcgaccacgactacatctacaacctggacgagagcgagggcgtgtgcgacctgtttgatgtgcccgtgctgaacctg

SEQ ID NO: 15 - DNA, 568 bp, synthetic construct
  source 1..568: mol_type = other DNA
ccaggctggacctctgtgccctgagcatggctttcttgtttttcagttttggaactccccaaagagctgtcagaaatctttgatcccacacgaggtaggctgctgcattcctccctgaggctaggggtaagggacacagctcattgggtcctatggctgttttcttgcccttttgaggaccttgttgtggcgcttatggtaactggggcaaagggtgaagttcctgatgggcaggtggggttccctttcctgggctttggtgggtggagaggtgggagctggaatgttagtaactgagctccctccattcccagagtgcatgagctcggagctgctggaggagttgatgtcctcagaaggtgggtggccctggaaggtgggagtgggtgtgggcaggggttgggctgctgctaggggagccctggcccagggcctgagactagtgctctctgcagtgtttgcccctctgcttcgtcttagtcctcctccgggcgaccacgactacatctacaacctggacgagagcgagggcgtgtgcgacctgtttgatgtgcccgtgctgaacctg

SEQ ID NO: 16 - DNA, 500 bp, synthetic construct
  source 1..500: mol_type = other DNA
gtcagaaatctttgatcccacacgaggtaggctgctgcattcctccctgaggctaggggtaagggacacagctcattgggtcctatggctgttttcttgcccttttgaggaccttgttgtggcgcttatggtaactggggcaaagggtgaagttcctgatgggcaggtggggttccctttcctgggctttggtgggtggagaggtgggagctggaatgttagtaactgagctccctccattcccagagtgcatgagctcggagctgctggaggagttgatgtcctcagaaggtgggtggccctggaaggtgggagtgggtgtgggcaggggttgggctgctgctaggggagccctggcccagggcctgagactagtgctctctgcagtgtttgcccctctgcttcgtctttctccacccccgggagaccacgattatatctacaacctggacgagagtgaaggtgtctgtgacctcttcgacgtgcccgtgctcaacctc

SEQ ID NO: 17 - DNA, 500 bp, synthetic construct
  source 1..500: mol_type = other DNA
ccacccccgggagaccacgattatatctacaacctggacgagagtgaaggtgtctgtgacctctttgatgtgcctgttctcaacctctgactgacagggacatgccctgtgtggctgggacccagactgtctgacctgggggttgcctggggacctctcccacccgacccctacagagcttgagagccacagacgcctggcttctccggcctcccctcaccgcacagttctggccacagctcccgctcctgtgctggcacttctgtgctcgcagagcaggggaacaggactcagcccccatcaccgtggagccaaagtgtttgcttctccctttctgcggccttcgccagcccaggctcggctgccacccagtggcacagaaccgaggagctgccattaccccccatagggggcagtgtcttgttcctgccagcctcagtgtcttgcttctgccagctccttcccctaggagggaagggtggggtggaactgggcacatg

SEQ ID NO: 18 - DNA, 500 bp, synthetic construct
  source 1..500: mol_type = other DNA
attatatctacaacctggacgagagtgaaggtgtctgtgacctctttgatgtgcctgttctcaacctctgactgacagggacatgccctgtgtggctgggacccagactgtctgacctgggggttgcctggggacctctcccacccgacccctacagagcttgagagccacagacgcctggcttctccggcctcccctcaccgcacagttctggccacagctcccgctcctgtgctggcacttctgtgctcgcagagcaggggaacaggactcagcccccatcaccgtggagccaaagtgtttgcttctccctttctgcggccttcgccagcccaggctcggctgccacccagtggcacagaaccgaggagctgccattaccccccatagggggcagtgtcttgttcctgccagcctcagtgtcttgcttctgccagctccttcccctaggagggaagggtggggtggaactgggcacatgccagcaccacttctagctt

SEQ ID NO: 19 - DNA, 500 bp, synthetic construct
  source 1..500: mol_type = other DNA
tgactgacagggacatgccctgtgtggctgggacccagactgtctgacctgggggttgcctggggacctctcccacccgacccctacagagcttgagagccacagacgcctggcttctccggcctcccctcaccgcacagttctggccacagctcccgctcctgtgctggcacttctgtgctcgcagagcaggggaacaggactcagcccccatcaccgtggagccaaagtgtttgcttctccctttctgcggccttcgccagcccaggctcggctgccacccagtggcacagaaccgaggagctgccattaccccccatagggggcagtgtcttgttcctgccagcctcagtgtcttgcttctgccagctccttcccctaggagggaagggtggggtggaactgggcacatgccagcaccacttctagcttccttcgctatcccccaccccctgaccctccagctcctcctggccctctcacgtgcccacttctgctgg

SEQ ID NO: 20 - DNA, 626 bp, synthetic construct
  source 1..626: mol_type = other DNA
agagcagggtttcttgacagcagtgctattggcattttaaactggataattctttgttgtgatgggctttcctgtggactgtactatgttggtacacaagaaaaacagtgtactatgtgaatactcactcaaagccagtagcactccctgattgtaacaccaaaaaagtctctcagcattgccaaatgtcccctgtggcagcagaatcactccctgatgagaaccactaccctggagtaaaatctataactatgtcttagaaaataacacagaaaattaatatttctttcactctactccttccattagtgatcaaataaagaaggcatttggcgctacttgccaaattgttggctcaaacttgtgctgaaccttttttggttttctacacttaagtttttttgcctataacccagagaactttgaaaatagagtgtagttaatgtgtatctaatgttactttgtattgacttaatttaccggcctttaatccacagcataagaagtcccacggcaaggacaaagagaaccggggcatcaacacactggaacggtccaaggtcgaggaaacaaccgagcacctggtcaccaagagcagactgcctctgagagcccagatcaacctg

SEQ ID NO: 21 - DNA, 558 bp, synthetic construct
  source 1..558: mol_type = other DNA
ttcctgtggactgtactatgttggtacacaagaaaaacagtgtactatgtgaatactcactcaaagccagtagcactccctgattgtaacaccaaaaaagtctctcagcattgccaaatgtcccctgtggcagcagaatcactccctgatgagaaccactaccctggagtaaaatctataactatgtcttagaaaataacacagaaaattaatatttctttcactctactccttccattagtgatcaaataaagaaggcatttggcgctacttgccaaattgttggctcaaacttgtgctgaaccttttttggttttctacacttaagtttttttgcctataacccagagaactttgaaaatagagtgtagttaatgtgtatctaatgttactttgtattgacttaattttcccgccttaaatccacagcataaaaaatcacatggaaaagacaaagaaaacagaggcattaacacactggagaggtctaaagtggaagaaacaaccgagcacctggtcaccaagagcagactgcctctgagagcccagatcaacctg

SEQ ID NO: 22 - DNA, 590 bp, synthetic construct
  source 1..590: mol_type = other DNA
ttaaactggataattctttgttgtgatgggctttcctgtggactgtactatgttggtacacaagaaaaacagtgtactatgtgaatactcactcaaagccagtagcactccctgattgtaacaccaaaaaagtctctcagcattgccaaatgtcccctgtggcagcagaatcactccctgatgagaaccactaccctggagtaaaatctataactatgtcttagaaaataacacagaaaattaatatttctttcactctactccttccattagtgatcaaataaagaaggcatttggcgctacttgccaaattgttggctcaaacttgtgctgaaccttttttggttttctacacttaagtttttttgcctataacccagagaactttgaaaatagagtgtagttaatgtgtatctaatgttactttgtattgacttaattttcccgccttaaatccacagcataaaaaatcacatggaaaagacaaagaaaacagaggcatcaacacactggaacggtccaaggtcgaggaaacaaccgagcacctggtcaccaagagcagactgcctctgagagcccagatcaacctg

SEQ ID NO: 23 - DNA, 500 bp, synthetic construct
  source 1..500: mol_type = other DNA
aaaaaatcacatggaaaagacaaagaaaacagaggcattaacacactggagaggtctaaagtggaagaaactacagagcacttggttacaaagagcagattacctctgcgagcccagatcaacctttaattcacttgggggttggcaattttatttttaaagaaaacttaaaaataaaacctgaaaccccagaacttgagccttgtgtatagattttaaaagaatatatatatcagccgggcgcggtggctcatgcctgtaatcccagcactttgggaggctgaggcgggtggattgcttgagcccaggagtttgagaccagcctggccaacgtggcaaaacctcgtctctgttaaaaattagccgggcgtggtggcacactcctgtaatcccagctactggggaggctgaggcacgagaatcacttgaacccaggaagcggggttgcagtgagccaaaggtacaccactacactccagcctgggcaacagagcaagact

SEQ ID NO: 24 - DNA, 500 bp, synthetic construct
  source 1..500: mol_type = other DNA
aactacagagcacttggctacatagagcagattacctctgcgagcccagatcaacctttaattcacttgggggttggcaattttatttttaaagaaaacttaaaaataaaacctgaaaccccagaacttgagccttgtgtatagattttaaaagaatatatatatcagccgggcgcggtggctcatgcctgtaatcccagcactttgggaggctgaggcgggtggattgcttgagcccaggagtttgagaccagcctggccaacgtggcaaaacctcgtctctgttaaaaattagccgggcgtggtggcacactcctgtaatcccagctactggggaggctgaggcacgagaatcacttgaacccaggaagcggggttgcagtgagccaaaggtacaccactacactccagcctgggcaacagagcaagactcggtctcaaaaacaaaatttaaaaaagatataaggcagtactgtaaattcagttgaattttgatatct

SEQ ID NO: 25 - DNA, 500 bp, synthetic construct
  source 1..500: mol_type = other DNA
attaacacactggagagttctgaagtggaagaaactacagagcacttggttacaaagagcagattacctctgcgagcccagatcaacctttaattcacttgggggttggcaattttatttttaaagaaaacttaaaaataaaacctgaaaccccagaacttgagccttgtgtatagattttaaaagaatatatatatcagccgggcgcggtggctcatgcctgtaatcccagcactttgggaggctgaggcgggtggattgcttgagcccaggagtttgagaccagcctggccaacgtggcaaaacctcgtctctgttaaaaattagccgggcgtggtggcacactcctgtaatcccagctactggggaggctgaggcacgagaatcacttgaacccaggaagcggggttgcagtgagccaaaggtacaccactacactccagcctgggcaacagagcaagactcggtctcaaaaacaaaatttaaaaaagatataaggc

SEQ ID NO: 26 - DNA, 51 bp, synthetic construct
  source 1..51: mol_type = other DNA
gcggccgcgtcgagtctagagggcccgtttaaacccgctgatcagcctcga

SEQ ID NO: 27 - DNA, 122 bp, synthetic construct
  source 1..122: mol_type = other DNA
aacttgtttattgcagcttataatggttacaaataaagcaatagcatcacaaatttcacaaataaagcatttttttcactgcattctagttgtggtttgtccaaactcatcaatgtatctta

SEQ ID NO: 28 - DNA, 225 bp, synthetic construct
  source 1..225: mol_type = other DNA
ctgtgccttctagttgccagccatctgttgtttgcccctcccccgtgccttccttgaccctggaaggtgccactcccactgtcctttcctaataaaatgaggaaattgcatcgcattgtctgagtaggtgtcattctattctggggggtggggtggggcaggacagcaagggggaggattgggaagacaatagcaggcatgctggggatgcggtgggctctatgg

SEQ ID NO: 29 - protein, 18 aa, synthetic construct
EGRGSLLTCGDVEENPGP

SEQ ID NO: 30 - protein, 19 aa, synthetic construct
ATNFSLLKQAGDVEENPGP

SEQ ID NO: 31 - protein, 20 aa, synthetic construct
QCTNYALLKLAGDVESNPGP

SEQ ID NO: 32 - protein, 22 aa, synthetic construct
VKQTLNFDLLKLAGDVESNPGP

SEQ ID NO: 33 - DNA, 54 bp, synthetic construct
  source 1..54: mol_type = other DNA
gagggcagaggaagtcttctaacatgcggtgacgtggaggagaatcctggcccg

SEQ ID NO: 34 - DNA, 66 bp, synthetic construct
  source 1..66: mol_type = other DNA
ggaagcggagctactaacttcagcctgctgaagcaggctggagacgtggaggagaaccctggacct

SEQ ID NO: 35 - DNA, 60 bp, synthetic construct
  source 1..60: mol_type = other DNA
cagtgtactaattatgctctcttgaaattggctggagatgttgagagcaaccctggacct

SEQ ID NO: 36 - DNA, 66 bp, synthetic construct
  source 1..66: mol_type = other DNA
gtgaaacagactttgaattttgaccttctcaagttggcgggagacgtggagtccaaccctggacct

SEQ ID NO: 37 - DNA, 574 bp, synthetic construct
  source 1..574: mol_type = other DNA
cccctctccctcccccccccctaacgttactggccgaagccgcttggaataaggccggtgtgcgtttgtctatatgttattttccaccatattgccgtcttttggcaatgtgagggcccggaaacctggccctgtcttcttgacgagcattcctaggggtctttcccctctcgccaaaggaatgcaaggtctgttgaatgtcgtgaaggaagcagttcctctggaagcttcttgaagacaaacaacgtctgtagcgaccctttgcaggcagcggaaccccccacctggcgacaggtgcctctgcggccaaaagccacgtgtataagatacacctgcaaaggcggcacaaccccagtgccacgttgtgagttggatagttgtggaaagagtcaaatggctctcctcaagcgtattcaacaaggggctgaaggatgcccagaaggtaccccattgtatgggatctgatctggggcctcggtgcacatgctttacatgtgtttagtcgaggttaaaaaaacgtctaggccccccgaaccacggggacgtggttttcctttgaaaaacacgatgataa

SEQ ID NO: 38-57 - skipped (20 entries)

SEQ ID NO: 58 - protein, 1334 aa, synthetic construct
MGHHHHHHGSTQFEGFTNLYQVSKTLRFELIPQGKTLKHIQEQGFIEEDKARNDHYKELKPIIDRIYKTYADQCLQLVQLDWENLSAAIDSYRKEKTEETRNALIEEQATYRNAIHDYFIGRTDNLTDAINKRHAEIYKGLFKAELFNGKVLKQLGTVTTTEHENALLRSFDKFTTYFSGFYENRKNVFSAEDISTAIPHRIVQDNFPKFKENCHIFTRLITAVPSLREHFENVKKAIGIFVSTSIEEVFSFPFYNQLLTQTQIDLYNQLLGGISREAGTEKIKGLNEVLNLAIQKNDETAHIIASLPHRFIPLFKQILSDRNTLSFILEEFKSDEEVIQSFCKYKTLLRNENVLETAEALFNELNSIDLTHIFISHKKLETISSALCDHWDTLRNALYERRISELTGKITKSAKEKVQRSLKHEDINLQEIISAAGKELSEAFKQKTSEILSHAHAALDQPLPTTLKKQEEKEILKSQLDSLLGLYHLLDWFAVDESNEVDPEFSARLTGIKLEMEPSLSFYNKARNYATKKPYSVEKFKLNFQMPTLASGWDVNKEKNNGAILFVKNGLYYLGIMPKQKGRYKALSFEPTEKTSEGFDKMYYDYFPDAAKMIPKCSTQLKAVTAHFQTHTTPILLSNNFIEPLEITKEIYDLNNPEKEPKKFQTAYAKKTGDQKGYREALCKWIDFTRDFLSKYTKTTSIDLSSLRPSSQYKDLGEYYAELNPLLYHISFQRIAEKEIMDAVETGKLYLFQIYNKDFAKGHHGKPNLHTLYWTGLFSPENLAKTSIKLNGQAELFYRPKSRMKRMAARLGEKMLNKKLKDQKTPIPDTLYQELYDYVNHRLSHDLSDEARALLPNVITKEVSHEIIKDRRFTSDKFFFHVPITLNYQAANSPSKFNQRVNAYLKEHPETPIIGIDRGERNLIYITVIDSTGKILEQRSLNTIQQFDYQKKLDNREKERVAARQAWSVVGTIKDLKQGYLSQVIHEIVDLMIHYQAVVVLENLNFGFKSKRTGIAEKAVYQQFEKMLIDKLNCLVLKDYPAEKVGGVLNPYQLTDQFTSFAKMGTQSGFLFYVPAPYTSKIDPLTGFVDPFVWKTIKNHESRKHFLEGFDFLHYDVKTGDFILHFKMNRNLSFQRGLPGFMPAWDIVFEKNETQFDAKGTPFIAGKRIVPVIENHRFTGRYRDLYPANELIALLEEKGIVFRDGSNILPKLLENDDSHAIDTMVALIRSVLQMRNSNAATGEDYINSPVRDLNGVCFDSRFQNPEWPMDADANGAYHIALKGQLLLNHLKESKDLKLQNGISNQDWLAYIQELRNGSPKKKRKVGSPKKKRKV

SEQ ID NO: 59 - protein, 1363 aa, synthetic construct
MTQFEGFTNLYQVSKTLRFELIPQGKTLKHIQEQGFIEEDKARNDHYKELKPIIDRIYKTYADQCLQLVQLDWENLSAAIDSYRKEKTEETRNALIEEQATYRNAIHDYFIGRTDNLTDAINKRHAEIYKGLFKAELFNGKVLKQLGTVTTTEHENALLRSFDKFTTYFSGFYENRKNVFSAEDISTAIPHRIVQDNFPKFKENCHIFTRLITAVPSLREHFENVKKAIGIFVSTSIEEVFSFPFYNQLLTQTQIDLYNQLLGGISREAGTEKIKGLNEVLNLAIQKNDETAHIIASLPHRFIPLFKQILSDRNTLSFILEEFKSDEEVIQSFCKYKTLLRNENVLETAEALFNELNSIDLTHIFISHKKLETISSALCDHWDTLRNALYERRISELTGKITKSAKEKVQRSLKHEDINLQEIISAAGKELSEAFKQKTSEILSHAHAALDQPLPTTLKKQEEKEILKSQLDSLLGLYHLLDWFAVDESNEVDPEFSARLTGIKLEMEPSLSFYNKARNYATKKPYSVEKFKLNFQRPTLASGWDVNKEKNNGAILFVKNGLYYLGIMPKQKGRYKALSFEPTEKTSEGFDKMYYDYFPDAAKMIPKCSTQLKAVTAHFQTHTTPILLSNNFIEPLEITKEIYDLNNPEKEPKKFQTAYAKKTGDQKGYREALCKWIDFTRDFLSKYTKTTSIDLSSLRPSSQYKDLGEYYAELNPLLYHISFQRIAEKEIMDAVETGKLYLFQIYNKDFAKGHHGKPNLHTLYWTGLFSPENLAKTSIKLNGQAELFYRPKSRMKRMAHRLGEKMLNKKLKDQKTPIPDTLYQELYDYVNHRLSHDLSDEARALLPNVITKEVSHEIIKDRRFTSDKFLFHVPITLNYQAANSPSKFNQRVNAYLKEHPETPIIGIDRGERNLIYITVIDSTGKILEQRSLNTIQQFDYQKKLDNREKERVAARQAWSVVGTIKDLKQGYLSQVIHEIVDLMIHYQAVVVLENLNFGFKSKRTGIAEKAVYQQFEKMLIDKLNCLVLKDYPAEKVGGVLNPYQLTDQFTSFAKMGTQSGFLFYVPAPYTSKIDPLTGFVDPFVWKTIKNHESRKHFLEGFDFLHYDVKTGDFILHFKMNRNLSFQRGLPGFMPAWDIVFEKNETQFDAKGTPFIAGKRIVPVIENHRFTGRYRDLYPANELIALLEEKGIVFRDGSNILPKLLENDDSHAIDTMVALIRSVLQMRNSNAATGEDYINSPVRDLNGVCFDSRFQNPEWPMDADANGAYHIALKGQLLLNHLKESKDLKLQNGISNQDWLAYIQELRNGRSSDDEATADSQHAAPPKKKRKVGGSGGSGGSGGSGGSGGSGGSGGSLEHHHHHH

SEQ ID NO: 60 - protein, 1363 aa, synthetic construct
MTQFEGFTNLYQVSKTLRFELIPQGKTLKHIQEQGFIEEDKARNDHYKELKPIIDRIYKTYADQCLQLVQLDWENLSAAIDSYRKEKTEETRNALIEEQATYRNAIHDYFIGRTDNLTDAINKRHAEIYKGLFKAELFNGKVLKQLGTVTTTEHENALLRSFDKFTTYFSGFYENRKNVFSAEDISTAIPHRIVQDNFPKFKENCHIFTRLITAVPSLREHFENVKKAIGIFVSTSIEEVFSFPFYNQLLTQTQIDLYNQLLGGISREAGTEKIKGLNEVLNLAIQKNDETAHIIASLPHRFIPLFKQILSDRNTLSFILEEFKSDEEVIQSFCKYKTLLRNENVLETAEALFNELNSIDLTHIFISHKKLETISSALCDHWDTLRNALYERRISELTGKITKSAKEKVQRSLKHEDINLQEIISAAGKELSEAFKQKTSEILSHAHAALDQPLPTTLKKQEEKEILKSQLDSLLGLYHLLDWFAVDESNEVDPEFSARLTGIKLEMEPSLSFYNKARNYATKKPYSVEKFKLNFQMPTLASGWDVNKEKNNGAILFVKNGLYYLGIMPKQKGRYKALSFEPTEKTSEGFDKMYYDYFPDAAKMIPKCSTQLKAVTAHFQTHTTPILLSNNFIEPLEITKEIYDLNNPEKEPKKFQTAYAKKTGDQKGYREALCKWIDFTRDFLSKYTKTTSIDLSSLRPSSQYKDLGEYYAELNPLLYHISFQRIAEKEIMDAVETGKLYLFQIYNKDFAKGHHGKPNLHTLYWTGLFSPENLAKTSIKLNGQAELFYRPKSRMKRMAHRLGEKMLNKKLKDQKTPIPDTLYQELYDYVNHRLSHDLSDEARALLPNVITKEVSHEIIKDRRFTSDKFFFHVPITLNYQAANSPSKFNQRVNAYLKEHPETPIIGIDRGERNLIYITVIDSTGKILEQRSLNTIQQFDYQKKLDNREKERVAARQAWSVVGTIKDLKQGYLSQVIHEIVDLMIHYQAVVVLENLNFGFKSKRTGIAEKAVYQQFEKMLIDKLNCLVLKDYPAEKVGGVLNPYQLTDQFTSFAKMGTQSGFLFYVPAPYTSKIDPLTGFVDPFVWKTIKNHESRKHFLEGFDFLHYDVKTGDFILHFKMNRNLSFQRGLPGFMPAWDIVFEKNETQFDAKGTPFIAGKRIVPVIENHRFTGRYRDLYPANELIALLEEKGIVFRDGSNILPKLLENDDSHAIDTMVALIRSVLQMRNSNAATGEDYINSPVRDLNGVCFDSRFQNPEWPMDADANGAYHIALKGQLLLNHLKESKDLKLQNGISNQDWLAYIQELRNGRSSDDEATADSQHAAPPKKKRKVGGSGGSGGSGGSGGSGGSGGSGGSLEHHHHHH

SEQ ID NO: 61 - protein, 1363 aa, synthetic construct
MTQFEGFTNLYQVSKTLRFELIPQGKTLKHIQEQGFIEEDKARNDHYKELKPIIDRIYKTYADQCLQLVQLDWENLSAAIDSYRKEKTEETRNALIEEQATYRNAIHDYFIGRTDNLTDAINKRHAEIYKGLFKAELFNGKVLKQLGTVTTTEHENALLRSFDKFTTYFSGFYENRKNVFSAEDISTAIPHRIVQDNFPKFKENCHIFTRLITAVPSLREHFENVKKAIGIFVSTSIEEVFSFPFYNQLLTQTQIDLYNQLLGGISREAGTEKIKGLNEVLNLAIQKNDETAHIIASLPHRFIPLFKQILSDRNTLSFILEEFKSDEEVIQSFCKYKTLLRNENVLETAEALFNELNSIDLTHIFISHKKLETISSALCDHWDTLRNALYERRISELTGKITKSAKEKVQRSLKHEDINLQEIISAAGKELSEAFKQKTSEILSHAHAALDQPLPTTLKKQEEKEILKSQLDSLLGLYHLLDWFAVDESNEVDPEFSARLTGIKLEMEPSLSFYNKARNYATKKPYSVEKFKLNFQRPTLASGWDVNKEKNNGAILFVKNGLYYLGIMPKQKGRYKALSFEPTEKTSEGFDKMYYDYFPDAAKMIPKCSTQLKAVTAHFQTHTTPILLSNNFIEPLEITKEIYDLNNPEKEPKKFQTAYAKKTGDQKGYREALCKWIDFTRDFLSKYTKTTSIDLSSLRPSSQYKDLGEYYAELNPLLYHISFQRIAEKEIMDAVETGKLYLFQIYNKDFAKGHHGKPNLHTLYWTGLFSPENLAKTSIKLNGQAELFYRPKSRMKRMAARLGEKMLNKKLKDQKTPIPDTLYQELYDYVNHRLSHDLSDEARALLPNVITKEVSHEIIKDRRFTSDKFLFHVPITLNYQAANSPSKFNQRVNAYLKEHPETPIIGIDRGERNLIYITVIDSTGKILEQRSLNTIQQFDYQKKLDNREKERVAARQAWSVVGTIKDLKQGYLSQVIHEIVDLMIHYQAVVVLENLNFGFKSKRTGIAEKAVYQQFEKMLIDKLNCLVLKDYPAEKVGGVLNPYQLTDQFTSFAKMGTQSGFLFYVPAPYTSKIDPLTGFVDPFVWKTIKNHESRKHFLEGFDFLHYDVKTGDFILHFKMNRNLSFQRGLPGFMPAWDIVFEKNETQFDAKGTPFIAGKRIVPVIENHRFTGRYRDLYPANELIALLEEKGIVFRDGSNILPKLLENDDSHAIDTMVALIRSVLQMRNSNAATGEDYINSPVRDLNGVCFDSRFQNPEWPMDADANGAYHIALKGQLLLNHLKESKDLKLQNGISNQDWLAYIQELRNGRSSDDEATADSQHAAPPKKKRKVGGSGGSGGSGGSGGSGGSGGSGGSLEHHHHHH

SEQ ID NO: 62 - protein, 1331 aa, synthetic construct
MTQFEGFTNLYQVSKTLRFELIPQGKTLKHIQEQGFIEEDKARNDHYKELKPIIDRIYKTYADQCLQLVQLDWENLSAAIDSYRKEKTEETRNALIEEQATYRNAIHDYFIGRTDNLTDAINKRHAEIYKGLFKAELFNGKVLKQLGTVTTTEHENALLRSFDKFTTYFSGFYENRKNVFSAEDISTAIPHRIVQDNFPKFKENCHIFTRLITAVPSLREHFENVKKAIGIFVSTSIEEVFSFPFYNQLLTQTQIDLYNQLLGGISREAGTEKIKGLNEVLNLAIQKNDETAHIIASLPHRFIPLFKQILSDRNTLSFILEEFKSDEEVIQSFCKYKTLLRNENVLETAEALFNELNSIDLTHIFISHKKLETISSALCDHWDTLRNALYERRISELTGKITKSAKEKVQRSLKHEDINLQEIISAAGKELSEAFKQKTSEILSHAHAALDQPLPTTLKKQEEKEILKSQLDSLLGLYHLLDWFAVDESNEVDPEFSARLTGIKLEMEPSLSFYNKARNYATKKPYSVEKFKLNFQRPTLASGWDVNKEKNNGAILFVKNGLYYLGIMPKQKGRYKALSFEPTEKTSEGFDKMYYDYFPDAAKMIPKCSTQLKAVTAHFQTHTTPILLSNNFIEPLEITKEIYDLNNPEKEPKKFQTAYAKKTGDQKGYREALCKWIDFTRDFLSKYTKTTSIDLSSLRPSSQYKDLGEYYAELNPLLYHISFQRIAEKEIMDAVETGKLYLFQIYNKDFAKGHHGKPNLHTLYWTGLFSPENLAKTSIKLNGQAELFYRPKSRMKRMAARLGEKMLNKKLKDQKTPIPDTLYQELYDYVNHRLSHDLSDEARALLPNVITKEVSHEIIKDRRFTSDKFLFHVPITLNYQAANSPSKFNQRVNAYLKEHPETPIIGIDRGERNLIYITVIDSTGKILEQRSLNTIQQFDYQKKLDNREKERVAARQAWSVVGTIKDLKQGYLSQVIHEIVDLMIHYQAVVVLENLNFGFKSKRTGIAEKAVYQQFEKMLIDKLNCLVLKDYPAEKVGGVLNPYQLTDQFTSFAKMGTQSGFLFYVPAPYTSKIDPLTGFVDPFVWKTIKNHESRKHFLEGFDFLHYDVKTGDFILHFKMNRNLSFQRGLPGFMPAWDIVFEKNETQFDAKGTPFIAGKRIVPVIENHRFTGRYRDLYPANELIALLEEKGIVFRDGSNILPKLLENDDSHAIDTMVALIRSVLQMRNSNAATGEDYINSPVRDLNGVCFDSRFQNPEWPMDADANGAYHIALKGQLLLNHLKESKDLKLQNGISNQDWLAYIQELRNGRSSDDEATADSQHAAPPKKKRKV

SEQ ID NO: 63 - protein, 1331 aa, synthetic construct
MTQFEGFTNLYQVSKTLRFELIPQGKTLKHIQEQGFIEEDKARNDHYKELKPIIDRIYKTYADQCLQLVQLDWENLSAAIDSYRKEKTEETRNALIEEQATYRNAIHDYFIGRTDNLTDAINKRHAEIYKGLFKAELFNGKVLKQLGTVTTTEHENALLRSFDKFTTYFSGFYENRKNVFSAEDISTAIPHRIVQDNFPKFKENCHIFTRLITAVPSLREHFENVKKAIGIFVSTSIEEVFSFPFYNQLLTQTQIDLYNQLLGGISREAGTEKIKGLNEVLNLAIQKNDETAHIIASLPHRFIPLFKQILSDRNTLSFILEEFKSDEEVIQSFCKYKTLLRNENVLETAEALFNELNSIDLTHIFISHKKLETISSALCDHWDTLRNALYERRISELTGKITKSAKEKVQRSLKHEDINLQEIISAAGKELSEAFKQKTSEILSHAHAALDQPLPTTLKKQEEKEILKSQLDSLLGLYHLLDWFAVDESNEVDPEFSARLTGIKLEMEPSLSFYNKARNYATKKPYSVEKFKLNFQRPTLASGWDVNKEKNNGAILFVKNGLYYLGIMPKQKGRYKALSFEPTEKTSEGFDKMYYDYFPDAAKMIPKCSTQLKAVTAHFQTHTTPILLSNNFIEPLEITKEIYDLNNPEKEPKKFQTAYAKKTGDQKGYREALCKWIDFTRDFLSKYTKTTSIDLSSLRPSSQYKDLGEYYAELNPLLYHISFQRIAEKEIMDAVETGKLYLFQIYNKDFAKGHHGKPNLHTLYWTGLFSPENLAKTSIKLNGQAELFYRPKSRMKRMAHRLGEKMLNKKLKDQKTPIPDTLYQELYDYVNHRLSHDLSDEARALLPNVITKEVSHEIIKDRRFTSDKFLFHVPITLNYQAANSPSKFNQRVNAYLKEHPETPIIGIDRGERNLIYITVIDSTGKILEQRSLNTIQQFDYQKKLDNREKERVAARQAWSVVGTIKDLKQGYLSQVIHEIVDLMIHYQAVVVLENLNFGFKSKRTGIAEKAVYQQFEKMLIDKLNCLVLKDYPAEKVGGVLNPYQLTDQFTSFAKMGTQSGFLFYVPAPYTSKIDPLTGFVDPFVWKTIKNHESRKHFLEGFDFLHYDVKTGDFILHFKMNRNLSFQRGLPGFMPAWDIVFEKNETQFDAKGTPFIAGKRIVPVIENHRFTGRYRDLYPANELIALLEEKGIVFRDGSNILPKLLENDDSHAIDTMVALIRSVLQMRNSNAATGEDYINSPVRDLNGVCFDSRFQNPEWPMDADANGAYHIALKGQLLLNHLKESKDLKLQNGISNQDWLAYIQELRNGRSSDDEATADSQHAAPPKKKRKV

SEQ ID NO: 64 - protein, 1363 aa, synthetic construct; identical to SEQ ID NO: 59

SEQ ID NO: 65 - protein, 1361 aa, synthetic construct
MGRDPGKPIPNPLLGLDSTAPKKKRKVGIHGVPAATQFEGFTNLYQVSKTLRFELIPQGKTLKHIQEQGFIEEDKARNDHYKELKPIIDRIYKTYADQCLQLVQLDWENLSAAIDSYRKEKTEETRNALIEEQATYRNAIHDYFIGRTDNLTDAINKRHAEIYKGLFKAELFNGKVLKQLGTVTTTEHENALLRSFDKFTTYFSGFYENRKNVFSAEDISTAIPHRIVQDNFPKFKENCHIFTRLITAVPSLREHFENVKKAIGIFVSTSIEEVFSFPFYNQLLTQTQIDLYNQLLGGISREAGTEKIKGLNEVLNLAIQKNDETAHIIASLPHRFIPLFKQILSDRNTLSFILEEFKSDEEVIQSFCKYKTLLRNENVLETAEALFNELNSIDLTHIFISHKKLETISSALCDHWDTLRNALYERRISELTGKITKSAKEKVQRSLKHEDINLQEIISAAGKELSEAFKQKTSEILSHAHAALDQPLPTTLKKQEEKEILKSQLDSLLGLYHLLDWFAVDESNEVDPEFSARLTGIKLEMEPSLSFYNKARNYATKKPYSVEKFKLNFQMPTLASGWDVNKEKNNGAILFVKNGLYYLGIMPKQKGRYKALSFEPTEKTSEGFDKMYYDYFPDAAKMIPKCSTQLKAVTAHFQTHTTPILLSNNFIEPLEITKEIYDLNNPEKEPKKFQTAYAKKTGDQKGYREALCKWIDFTRDFLSKYTKTTSIDLSSLRPSSQYKDLGEYYAELNPLLYHISFQRIAEKEIMDAVETGKLYLFQIYNKDFAKGHHGKPNLHTLYWTGLFSPENLAKTSIKLNGQAELFYRPKSRMKRMAHRLGEKMLNKKLKDQKTPIPDTLYQELYDYVNHRLSHDLSDEARALLPNVITKEVSHEIIKDRRFTSDKFFFHVPITLNYQAANSPSKFNQRVNAYLKEHPETPIIGIDRGERNLIYITVIDSTGKILEQRSLNTIQQFDYQKKLDNREKERVAARQAWSVVGTIKDLKQGYLSQVIHEIVDLMIHYQAVVVLENLNFGFKSKRTGIAEKAVYQQFEKMLIDKLNCLVLKDYPAEKVGGVLNPYQLTDQFTSFAKMGTQSGFLFYVPAPYTSKIDPLTGFVDPFVWKTIKNHESRKHFLEGFDFLHYDVKTGDFILHFKMNRNLSFQRGLPGFMPAWDIVFEKNETQFDAKGTPFIAGKRIVPVIENHRFTGRYRDLYPANELIALLEEKGIVFRDGSNILPKLLENDDSHAIDTMVALIRSVLQMRNSNAATGEDYINSPVRDLNGVCFDSRFQNPEWPMDADANGAYHIALKGQLLLNHLKESKDLKLQNGISNQDWLAYIQELRNPKKKRKVKLAAALEHHHHHH

SEQ ID NO: 66 - protein, 1307 aa, synthetic construct
MTQFEGFTNLYQVSKTLRFELIPQGKTLKHIQEQGFIEEDKARNDHYKELKPIIDRIYKTYADQCLQLVQLDWENLSAAIDSYRKEKTEETRNALIEEQATYRNAIHDYFIGRTDNLTDAINKRHAEIYKGLFKAELFNGKVLKQLGTVTTTEHENALLRSFDKFTTYFSGFYENRKNVFSAEDISTAIPHRIVQDNFPKFKENCHIFTRLITAVPSLREHFENVKKAIGIFVSTSIEEVFSFPFYNQLLTQTQIDLYNQLLGGISREAGTEKIKGLNEVLNLAIQKNDETAHIIASLPHRFIPLFKQILSDRNTLSFILEEFKSDEEVIQSFCKYKTLLRNENVLETAEALFNELNSIDLTHIFISHKKLETISSALCDHWDTLRNALYERRISELTGKITKSAKEKVQRSLKHEDINLQEIISAAGKELSEAFKQKTSEILSHAHAALDQPLPTTLKKQEEKEILKSQLDSLLGLYHLLDWFAVDESNEVDPEFSARLTGIKLEMEPSLSFYNKARNYATKKPYSVEKFKLNFQMPTLASGWDVNKEKNNGAILFVKNGLYYLGIMPKQKGRYKALSFEPTEKTSEGFDKMYYDYFPDAAKMIPKCSTQLKAVTAHFQTHTTPILLSNNFIEPLEITKEIYDLNNPEKEPKKFQTAYAKKTGDQKGYREALCKWIDFTRDFLSKYTKTTSIDLSSLRPSSQYKDLGEYYAELNPLLYHISFQRIAEKEIMDAVETGKLYLFQIYNKDFAKGHHGKPNLHTLYWTGLFSPENLAKTSIKLNGQAELFYRPKSRMKRMAHRLGEKMLNKKLKDQKTPIPDTLYQELYDYVNHRLSHDLSDEARALLPNVITKEVSHEIIKDRRFTSDKFFFHVPITLNYQAANSPSKFNQRVNAYLKEHPETPIIGIDRGERNLIYITVIDSTGKILEQRSLNTIQQFDYQKKLDNREKERVAARQAWSVVGTIKDLKQGYLSQVIHEIVDLMIHYQAVVVLENLNFGFKSKRTGIAEKAVYQQFEKMLIDKLNCLVLKDYPAEKVGGVLNPYQLTDQFTSFAKMGTQSGFLFYVPAPYTSKIDPLTGFVDPFVWKTIKNHESRKHFLEGFDFLHYDVKTGDFILHFKMNRNLSFQRGLPGFMPAWDIVFEKNETQFDAKGTPFIAGKRIVPVIENHRFTGRYRDLYPANELIALLEEKGIVFRDGSNILPKLLENDDSHAIDTMVALIRSVLQMRNSNAATGEDYINSPVRDLNGVCFDSRFQNPEWPMDADANGAYHIALKGQLLLNHLKESKDLKLQNGISNQDWLAYIQELRN

SEQ ID NO: 67 - RNA, 10 nt, synthetic construct
  source 1..10: mol_type = other RNA
aagacctttt

SEQ ID NO: 68 - RNA, 25 nt, synthetic construct
  source 1..25: mol_type = other RNA
atgtgtttttgtcaaaagacctttt

SEQ ID NO: 69 - RNA, 60 nt, synthetic construct
  source 1..60: mol_type = other RNA
aggccagcttgccggttttttagtcgtgctgcttcatgtgtttttgtcaaaagacctttt

SEQ ID NO: 70 - DNA, 10 bp, synthetic construct
  source 1..10: mol_type = other DNA
aagacctttt

SEQ ID NO: 71 - DNA, 25 bp, synthetic construct
  source 1..25: mol_type = other DNA
atgtgtttttgtcaaaagacctttt

SEQ ID NO: 72 - DNA, 60 bp, synthetic construct
  source 1..60: mol_type = other DNA
aggccagcttgccggttttttagtcgtgctgcttcatgtgtttttgtcaaaagacctttt

SEQ ID NO: 73 - DNA, 20 bp, synthetic construct
  source 1..20: mol_type = other DNA
tttttgtcaaaagacctttt

SEQ ID NO: 74 - DNA, 30 bp, synthetic construct
  source 1..30: mol_type = other DNA
gcttcatgtgtttttgtcaaaagacctttt

SEQ ID NO: 75 - DNA, 50 bp, synthetic construct
  source 1..50: mol_type = other DNA
gccggttttttagtcgtgctgcttcatgtgtttttgtcaaaagacctttt

SEQ ID NO: 76 - DNA, 40 bp, synthetic construct
  source 1..40: mol_type = other DNA
tagtcgtgctgcttcatgtgtttttgtcaaaagacctttt

SEQ ID NO: 77 - DNA, 20 bp, synthetic construct
  source 1..20: mol_type = other DNA
  modified_base 1: mod_base = OTHER; note = Nucleotide with phosphorothioate linkage
  modified_base 2: mod_base = OTHER; note = Nucleotide with phosphorothioate linkage
ccgaagttttcttcggtttt

SEQ ID NO: 78 - DNA, 25 bp, synthetic construct
  source 1..25: mol_type = other DNA
  modified_base 1: mod_base = OTHER; note = Nucleotide with phosphorothioate linkage
  modified_base 2: mod_base = OTHER; note = Nucleotide with phosphorothioate linkage
tttttccgaagttttcttcggtttt

SEQ ID NO: 79 - DNA, 30 bp, synthetic construct
  source 1..30: mol_type = other DNA
  modified_base 1: mod_base = OTHER; note = Nucleotide with phosphorothioate linkage
  modified_base 2: mod_base = OTHER; note = Nucleotide with phosphorothioate linkage
aacgctttttccgaagttttcttcggtttt

SEQ ID NO: 80 - DNA, 41 bp, synthetic construct
  source 1..41: mol_type = other DNA
  modified_base 1: mod_base = OTHER; note = Nucleotide with phosphorothioate linkage
  modified_base 2: mod_base = OTHER; note = Nucleotide with phosphorothioate linkage
gcgttgttttcaacgctttttccgaagttttcttcggtttt

SEQ ID NO: 81 - DNA, 62 bp, synthetic construct
  source 1..62: mol_type = other DNA
  modified_base 1: mod_base = OTHER; note = Nucleotide with phosphorothioate linkage
  modified_base 2: mod_base = OTHER; note = Nucleotide with phosphorothioate linkage
ggcttcttttgaagcctttttgcgttgttttcaacgctttttccgaagttttcttcggtttt

SEQ ID NO: 82 - DNA, 25 bp, synthetic construct
  source 1..25: mol_type = other DNA
  modified_base 1: mod_base = OTHER; note = Nucleotide with phosphorothioate linkage
  modified_base 2: mod_base = OTHER; note = Nucleotide with phosphorothioate linkage
atgtgtttttgtcaaaagacctttt

SEQ ID NO: 83 - RNA, 25 nt, synthetic construct
  source 1..25: mol_type = other RNA
aaaaaaaaaaaaaaaaaaaaaaaaa

SEQ ID NO: 84 - DNA, 25 bp, synthetic construct
  source 1..25: mol_type = other DNA
ttttttttttttttttttttttttt

SEQ ID NO: 85 - RNA, 25 nt, synthetic construct
  source 1..25: mol_type = other RNA
  modified_base 1: mod_base = OTHER; note = 2'-O-methyl modified nucleotide with phosphorothioate linkage
  modified_base 2: mod_base = OTHER; note = 2'-O-methyl modified nucleotide with phosphorothioate linkage
atgtgtttttgtcaaaagacctttt

SEQ ID NO: 86 - RNA, 25 nt, synthetic construct
  source 1..25: mol_type = other RNA
  modified_base 1: mod_base = OTHER; note = 2'-O-methyl modified nucleotide with phosphorothioate linkage
  modified_base 2: mod_base = OTHER; note = 2'-O-methyl modified nucleotide with phosphorothioate linkage
aaaaaaaaaaaaaaaaaaaaaaaaa

SEQ ID NO: 87 - RNA, 25 nt, synthetic construct
  source 1..25: mol_type = other RNA
  modified_base 1: mod_base = OTHER; note = 2'-O-methyl modified nucleotide with phosphorothioate linkage
  modified_base 2: mod_base = OTHER; note = 2'-O-methyl modified nucleotide with phosphorothioate linkage
ttttttttttttttttttttttttt

SEQ ID NO: 88 - DNA, 20 bp, synthetic construct
  source 1..20: mol_type = other DNA
tctgcagaaatgttccccgt

SEQ ID NO: 89 - RNA, 20 nt, synthetic construct
  source 1..20: mol_type = other RNA
tctgcagaaatgttccccgt

SEQ ID NO: 90 - RNA, 20 nt, synthetic construct
  source 1..20: mol_type = other RNA
taatttctactcttgtagat

SEQ ID NO: 91 - RNA, 40 nt, synthetic construct
  source 1..40: mol_type = other RNA
taatttctactcttgtagattctgcagaaatgttccccgt

SEQ ID NO: 92 - DNA, 65 bp, synthetic construct
  source 1..65: mol_type = other DNA
  misc_feature 1..25: note = DNA
  misc_feature 26..65: note = RNA
atgtgtttttgtcaaaagacctttttaatttctactcttgtagattctgcagaaatgttccccgt

SEQ ID NO: 93 - RNA, 41 nt, synthetic construct
  source 1..41: mol_type = other RNA
taatttctactcttgtagatatcttctaggtatgacaacga

SEQ ID NO: 94 - RNA, 21 nt, synthetic construct
  source 1..21: mol_type = other RNA
tgagccagccaccagagggcg

SEQ ID NO: 95 - RNA, 21 nt, synthetic construct
  source 1..21: mol_type = other RNA
atcttctaggtatgacaacga

SEQ ID NO: 96 - RNA, 21 nt, synthetic construct
  source 1..21: mol_type = other RNA
gctacagcaacagggtggtgg

SEQ ID NO: 97 - RNA, 21 nt, synthetic construct
  source 1..21: mol_type = other RNA
ccataatttcctttcaaggtg

SEQ ID NO: 98 - RNA, 21 nt, synthetic construct
  source 1..21: mol_type = other RNA
ctttcaaggtggggagggagg

SEQ ID NO: 99 - RNA, 21 nt, synthetic construct
  source 1..21: mol_type = other RNA
aaggtggggagggaggtagag

SEQ ID NO: 100 - RNA, 21 nt, synthetic construct
  source 1..21: mol_type = other RNA
gcagaccacagtccatgccat

SEQ ID NO: 101 - RNA, 21 nt, synthetic construct
  source 1..21: mol_type = other RNA
cagaccacagtccatgccatc

SEQ ID NO: 102 - RNA, 21 nt, synthetic construct
  source 1..21: mol_type = other RNA
ccggaggggccatccacagtc

SEQ ID NO: 103 - RNA, 21 nt, synthetic construct
  source 1..21: mol_type = other RNA
tagacggcaggtcaggtccac

SEQ ID NO: 104 - RNA, 21 nt, synthetic construct
  source 1..21: mol_type = other RNA
ctagacggcaggtcaggtcca

SEQ ID NO: 105 - RNA, 21 nt, synthetic construct
  source 1..21: mol_type = other RNA
tctagacggcaggtcaggtcc

SEQ ID NO: 106 - RNA, 21 nt, synthetic construct
  source 1..21: mol_type = other RNA
gcaggtttttctagacggcag

SEQ ID NO: 107 - RNA, 21 nt, synthetic construct
  source 1..21: mol_type = other RNA
tcaagctcatttcctggtatg

SEQ ID NO: 108 - RNA, 21 nt, synthetic construct
  source 1..21: mol_type = other RNA
ctggtatgtggctggggccag

SEQ ID NO: 109 - RNA, 21 nt, synthetic construct
  source 1..21: mol_type = other RNA
agagccagtctctggccccag

SEQ ID NO: 110 - RNA, 21 nt, synthetic construct
  source 1..21: mol_type = other RNA
aagagccagtctctggcccca

SEQ ID NO: 111 - RNA, 21 nt, synthetic construct
  source 1..21: mol_type = other RNA
taagagccagtctctggcccc

SEQ ID NO: 112 - RNA, 21 nt, synthetic construct
  source 1..21: mol_type = other RNA
ctgagccagccaccagagggc

SEQ ID NO: 113 - RNA, 21 nt, synthetic construct
  source 1..21: mol_type = other RNA
tctgagccagccaccagaggg

SEQ ID NO: 114 - RNA, 21 nt, synthetic construct
  source 1..21: mol_type = other RNA
catcttctaggtatgacaacg

SEQ ID NO: 115 - RNA, 21 nt, synthetic construct
  source 1..21: mol_type = other RNA
ttgatggtacatgacaaggtg

SEQ ID NO: 116 - RNA, 21 nt, synthetic construct
  source 1..21: mol_type = other RNA
gaggccctaccctcagtctga

SEQ ID NO: 117 - RNA, 21 nt, synthetic construct
  source 1..21: mol_type = other RNA
cctctcctcgctccagtccta

SEQ ID NO: 118 - RNA, 21 nt, synthetic construct
  source 1..21: mol_type = other RNA
ctctcctcgctccagtcctag

SEQ ID NO: 119 - RNA, 21 nt, synthetic construct
  source 1..21: mol_type = other RNA
gccaacagcagatagcctagg

SEQ ID NO: 120 - RNA, 21 nt, synthetic construct
  source 1..21: mol_type = other RNA
tgtgccctcgtgtcttatctg

SEQ ID NO: 121 - RNA, 21 nt, synthetic construct
  source 1..21: mol_type = other RNA
cctagatgaatcctgcttgaa

SEQ ID NO: 122 - RNA, 21 nt, synthetic construct
  source 1..21: mol_type = other RNA
ggtacttggtttacctagatg

SEQ ID NO: 123 - RNA, 21 nt, synthetic construct
  source 1..21: mol_type = other RNA
aggtacttggtttacctagat

SEQ ID NO: 124 - RNA, 21 nt, synthetic construct
  source 1..21: mol_type = other RNA
aaacattatatagtccttacc

SEQ ID NO: 125 - RNA, 21 nt, synthetic construct
  source 1..21: mol_type = other RNA
taaacattatatagtccttac

SEQ ID NO: 126 - RNA, 21 nt, synthetic construct
  source 1..21: mol_type = other RNA
ccgatttttaaacattatata

SEQ ID NO: 127 - RNA, 21 nt, synthetic construct
  source 1..21: mol_type = other RNA
accgatttttaaacattatat

SEQ ID NO: 128 - RNA, 21 nt, synthetic construct
  source 1..21: mol_type = other RNA
taccgatttttaaacattata

SEQ ID NO: 129 - RNA, 21 nt, synthetic construct
  source 1..21: mol_type = other RNA
aaaatcggtaaaaatgcccac

SEQ ID NO: 130 - RNA, 21 nt, synthetic construct
  source 1..21: mol_type = other RNA
gaggaagatgaactgagatgt

SEQ ID NO: 131 - RNA, 21 nt, synthetic construct
  source 1..21: mol_type = other RNA
aggaagatgaactgagatgtg

SEQ ID NO: 132-157 - skipped (26 entries)

SEQ ID NO: 158 - DNA, 141 bp, synthetic construct
  source 1..141: mol_type = other DNA
cctgcaggcagctgcgcgctcgctcgctcactgaggccgcccgggcaaagcccgggcgtcgggcgacctttggtcgcccggcctcagtgagcgagcgagcgcgcagagagggagtggccaactccatcactaggggttcct

SEQ ID NO: 159 - DNA, 141 bp, synthetic construct
  source 1..141: mol_type = other DNA
aggaacccctagtgatggagttggccactccctctctgcgcgctcgctcgctcactgaggccgggcgaccaaaggtcgcccgacgcccgggctttgcccgggcggcctcagtgagcgagcgagcgcgcagctgcctgcagg

SEQ ID NO: 160-224 - skipped (65 entries)

SEQ ID NO: 225 - DNA, 21 bp, synthetic construct
  source 1..21: mol_type = other DNA
aggctttggctggttctttag

SEQ ID NO: 226 - DNA, 21 bp, synthetic construct
  source 1..21: mol_type = other DNA
gctggttctttagtcagcttc

SEQ ID NO: 227 - DNA, 21 bp, synthetic construct
  source 1..21: mol_type = other DNA
gtcagcttcttcctctgattc

SEQ ID NO: 228 - DNA, 21 bp, synthetic construct
  source 1..21: mol_type = other DNA
taaccaggttagccactgatt

SEQ ID NO: 229 - DNA, 21 bp, synthetic construct
  source 1..21: mol_type = other DNA
acaaaagacttacctggaaca

SEQ ID NO: 230 - DNA, 21 bp, synthetic construct
  source 1..21: mol_type = other DNA
ccggaaactcttgggttatat

SEQ ID NO: 231 - DNA, 21 bp, synthetic construct
  source 1..21: mol_type = other DNA
caagccaagaaagcttcttct

SEQ ID NO: 232 - DNA, 21 bp, synthetic construct
  source 1..21: mol_type = other DNA
catgtcatagaagtgcacaaa

SEQ ID NO: 233 - DNA, 21 bp, synthetic construct
  source 1..21: mol_type = other DNA
ggaagttgctgttatagcagt

SEQ ID NO: 234 - DNA, 21 bp, synthetic construct
  source 1..21: mol_type = other DNA
tgcattactggcttgaaagat

SEQ ID NO: 235 - DNA, 21 bp, synthetic construct
  source 1..21: mol_type = other DNA
ctgctctaactgttctttgga

SEQ ID NO: 236 - DNA, 21 bp, synthetic construct
  source 1..21: mol_type = other DNA
gaaggagcagaggatgaatct

SEQ ID NO: 237 - DNA, 21 bp, synthetic construct
  source 1..21: mol_type = other DNA
atcgctgggggggtttacttc

SEQ ID NO: 238 - DNA, 21 bp, synthetic construct
  source 1..21: mol_type = other DNA
cttcactagaaatgtactgta

SEQ ID NO: 239 - DNA, 21 bp, synthetic construct
  source 1..21: mol_type = other DNA
tctacatgaagtttgggagag

SEQ ID NO: 240 - DNA, 21 bp, synthetic construct
  source 1..21: mol_type = other DNA
ggagagatgttatctttaatc

SEQ ID NO: 241 - DNA, 21 bp, synthetic construct
  source 1..21: mol_type = other DNA
tatatggtttgaggggatgga

SEQ ID NO: 242 - DNA, 21 bp, synthetic construct
  source 1..21: mol_type = other DNA
aggggatggatccaactttat

SEQ ID NO: 243 - DNA, 21 bp, synthetic construct
  source 1..21: mol_type = other DNA
taggtgaatcagtggctaacc

SEQ ID NO: 244 - DNA, 21 bp, synthetic construct
  source 1..21: mol_type = other DNA
caaatcttaatttataggtga

SEQ ID NO: 245 - DNA, 21 bp, synthetic construct
  source 1..21: mol_type = other DNA
atttacaaatcttaatttata

SEQ ID NO: 246 - DNA, 21 bp, synthetic construct
  source 1..21: mol_type = other DNA
cgggaaaaggcaaggctttgt

SEQ ID NO: 247 - DNA, 21 bp, synthetic construct
  source 1..21: mol_type = other DNA
ttggcttggaaagaagatata

SEQ ID NO: 248 - DNA, 21 bp, synthetic construct
  source 1..21: mol_type = other DNA
tgcacttctatgacatggaaa

SEQ ID NO: 249 - DNA, 21 bp, synthetic construct
  source 1..21: mol_type = other DNA
aggcatgttacttcgcttttt

SEQ ID NO: 250 - DNA, 21 bp, synthetic construct
  source 1..21: mol_type = other DNA
ttcatgatcacgttgatctac

SEQ ID NO: 251 - DNA, 21 bp, synthetic construct
  source 1..21: mol_type = other DNA
aagccagtaatgcagaaattt

SEQ ID NO: 252 - DNA, 21 bp, synthetic construct
  source 1..21: mol_type = other DNA
tagtgaagtaaacccccccag

SEQ ID NO: 253 - DNA, 21 bp, synthetic construct
  source 1..21: mol_type = other DNA
tgtccagcttcttacagtaca

SEQ ID NO: 254 - DNA, 21 bp, synthetic construct
  source 1..21: mol_type = other DNA
tgaacatcttaatgactaggt

SEQ ID NO: 255 - DNA, 21 bp, synthetic construct
  source 1..21: mol_type = other DNA
aagaccttaccttttttaata

SEQ ID NO: 256 - DNA, 21 bp, synthetic construct
  source 1..21: mol_type = other DNA
caatgaacttaccttccaaca

SEQ ID NO: 257 - DNA, 21 bp, synthetic construct
  source 1..21: mol_type = other DNA
agcagggcagaataaaaacca

SEQ ID NO: 258 - DNA, 21 bp, synthetic construct
  source 1..21: mol_type = other DNA
ttcataatttcagcagggcag

SEQ ID NO: 259 - DNA, 21 bp, synthetic construct
  source 1..21: mol_type = other DNA
ctttgttcataatttcagcag

SEQ ID NO: 260 - DNA, 21 bp, synthetic construct
  source 1..21: mol_type = other DNA
caggctgcaaactacttagac

SEQ ID NO: 261 - DNA, 21 bp, synthetic construct
  source 1..21: mol_type = other DNA
ttgttgtaggtcattcagtgg

SEQ ID NO: 262 - DNA, 21 bp, synthetic construct
  source 1..21: mol_type = other DNA
ttagatttgggaatggatgat

SEQ ID NO: 263 - DNA, 21 bp, synthetic construct
  source 1..21: mol_type = other DNA
ttctggttttcttagatttgg

SEQ ID NO: 264 - DNA, 21 bp, synthetic construct
  source 1..21: mol_type = other DNA
gatgccttcaattaagttgca

SEQ ID NO: 265 - DNA, 21 bp, synthetic construct
  source 1..21: mol_type = other DNA
atgtcctttttttttagatgc

SEQ ID NO: 266 - DNA, 21 bp, synthetic construct
  source 1..21: mol_type = other DNA
aagctttatgctgaaaaggtg

SEQ ID NO: 267 - DNA, 21 bp, synthetic construct
  source 1..21: mol_type = other DNA
aagggcctgctatggtgtgct

SEQ ID NO: 268 - DNA, 21 bp, synthetic construct
  source 1..21: mol_type = other DNA
aaggaagcaagggatatcctg

SEQ ID NO: 269 - DNA, 21 bp, synthetic construct
  source 1..21: mol_type = other DNA
agcataaagctttaaaggaag

SEQ ID NO: 270 - DNA, 21 bp, synthetic construct
  source 1..21: mol_type = other DNA
ccagacaccacaacctcgcag

SEQ ID NO: 271 - DNA, 21 bp, synthetic construct
  source 1..21: mol_type = other DNA
ccaagcactctcagctgctca

SEQ ID NO: 272 - DNA, 21 bp, synthetic construct
  source 1..21: mol_type = other DNA
ttcttccatcttttcccacag

SEQ ID NO: 273 - DNA, 21 bp, synthetic construct
  source 1..21: mol_type = other DNA
ccacaggtggcagctgccaac

SEQ ID NO: 274 - DNA, 21 bp, synthetic construct
  source 1..21: mol_type = other DNA
tctgacgtcccccatagatct

SEQ ID NO: 275 - DNA, 21 bp, synthetic construct
  source 1..21: mol_type = other DNA
agccctcttaccttccacctc

SEQ ID NO: 276 - DNA, 21 bp, synthetic construct
  source 1..21: mol_type = other DNA
tgttcatttattgaagttcta

SEQ ID NO: 277 - DNA, 21 bp, synthetic construct
  source 1..21: mol_type = other DNA
gttcggccttcttcctcttct

SEQ ID NO: 278 - DNA, 21 bp, synthetic construct
  source 1..21: mol_type = other DNA
tagaccatgtctgctaaagag

SEQ ID NO: 279 - DNA, 21 bp, synthetic construct
  source 1..21: mol_type = other DNA
gaaaaataactaaacatgggc

SEQ ID NO: 280 - DNA, 21 bp, synthetic construct
  source 1..21: mol_type = other DNA
ccccaaatagaacctaccaag

SEQ ID NO: 281 - DNA, 21 bp, synthetic construct
  source 1..21: mol_type = other DNA
acttcaggtaccccaatctga

SEQ ID NO: 282 - DNA, 21 bp, synthetic construct
  source 1..21: mol_type = other DNA
ctttttcacttcaggtacccc

SEQ ID NO: 283 - DNA, 21 bp, synthetic construct
  source 1..21: mol_type = other DNA
tgtttgctttttcacttcagg

SEQ ID NO: 284 - DNA, 21 bp, synthetic construct
  source 1..21: mol_type = other DNA
accacagtatcaatggagtga

SEQ ID NO: 285 - DNA, 21 bp, synthetic construct
  source 1..21: mol_type = other DNA
tggtccgttttcaccacagta

SEQ ID NO: 286 - DNA, 21 bp, synthetic construct
  source 1..21: mol_type = other DNA
aggtcaaggccttcttggctg

SEQ ID NO: 287 - DNA, 21 bp, synthetic construct
  source 1..21: mol_type = other DNA
accacttcccccctcctttca

SEQ ID NO: 288 - DNA, 21 bp, synthetic construct
  source 1..21: mol_type = other DNA
ctcacctgccataaatatagg

SEQ ID NO: 289 - DNA, 21 bp, synthetic construct
  source 1..21: mol_type = other DNA
cagtatgagggcacctacaag

SEQ ID NO: 290 - DNA, 21 bp, synthetic construct
  source 1..21: mol_type = other DNA
accccactgctgcaccagatt

SEQ ID NO: 291 - DNA, 21 bp, synthetic construct
  source 1..21: mol_type = other DNA
cgccacgtaggggtgcccttc

SEQ ID NO: 292 - DNA, 21 bp, synthetic construct
  source 1..21: mol_type = other DNA
gcttgtagtgccgctgctgca

SEQ ID NO: 293 - DNA, 21 bp, synthetic construct
  source 1..21: mol_type = other DNA
ccgtggtgctcgaagggctct

SEQ ID NO: 294 - DNA, 21 bp, synthetic construct
  source 1..21: mol_type = other DNA
ttgcagcacaagctccgggtg

SEQ ID NO: 295 - DNA, 21 bp, synthetic construct
  source 1..21: mol_type = other DNA
tgcctaatttgttgcagcaca

SEQ ID NO: 296 - DNA, 21 bp, synthetic construct
  source 1..21: mol_type = other DNA
tagcaagaagatccatcgcag

SEQ ID NO: 297 - DNA, 21 bp, synthetic construct
  source 1..21: mol_type = other DNA
agtcttcccatgcacaagatg

SEQ ID NO: 298 - DNA, 21 bp, synthetic construct
  source 1..21: mol_type = other DNA
cctttcagtcttcccatgcac

SEQ ID NO: 299 - DNA, 21 bp, synthetic construct
  source 1..21: mol_type = other DNA
tccccagctgagtccagattg

SEQ ID NO: 300 - DNA, 21 bp, synthetic construct
  source 1..21: mol_type = other DNA
ttcctcttagtacctttgtgt

SEQ ID NO: 301 - DNA, 21 bp, synthetic construct
  source 1..21: mol_type = other DNA
gatggctcccgcaaagaaggg

SEQ ID NO: 302 - DNA, 21 bp, synthetic construct
  source 1..21: mol_type = other DNA
aatcgtaggggcttcaagaag

SEQ ID NO: 303 - DNA, 21 bp, synthetic construct
  source 1..21: mol_type = other DNA
ttaggaatgtgccataccgaa

SEQ ID NO: 304 - DNA, 21 bp, synthetic construct
  source 1..21: mol_type = other DNA
cagatctacagacagtcaatg

SEQ ID NO: 305 - DNA, 21 bp, synthetic construct
  source 1..21: mol_type = other DNA
gcaccttattcctttggccca

SEQ ID NO: 306 - DNA, 21 bp, synthetic construct
  source 1..21: mol_type = other DNA
tgggatggagaacttactttt

SEQ ID NO: 307 - DNA, 21 bp, synthetic construct
  source 1..21: mol_type = other DNA
atctgacgatcagcgattagt

SEQ ID NO: 308 - DNA, 21 bp, synthetic construct
  source 1..21: mol_type = other DNA
actgtctttttcatattttag

SEQ ID NO: 309 - DNA, 21 bp, synthetic construct
  source 1..21: mol_type = other DNA
atattttaggacccagatgat

SEQ ID NO: 310 - DNA, 21 bp, synthetic construct
  source 1..21: mol_type = other DNA
ggacccagatgatgtggtacc

SEQ ID NO: 311 - DNA, 21 bp, synthetic construct
  source 1..21: mol_type = other DNA
gactagcatttatgcttgcag

SEQ ID NO: 312 - DNA, 21 bp, synthetic construct
  source 1..21: mol_type = other DNA
tgcttgcaggtgttattctag

SEQ ID NO: 313 - DNA, 21 bp, synthetic construct
  source 1..21: mol_type = other DNA
tgaatgtaggctggaacctat

SEQ ID NO: 314 - DNA, 21 bp, synthetic construct
  source 1..21: mol_type = other DNA
cctcagtcctatctgattcat

SEQ ID NO: 315 - DNA, 21 bp, synthetic construct
  source 1..21: mol_type = other DNA
tttatttatcgactgtgtcat

SEQ ID NO: 316 - DNA, 21 bp, synthetic construct
  source 1..21: mol_type = other DNA
tttatcgactgtgtcatgaca

SEQ ID NO: 317 - DNA, 21 bp, synthetic construct
  source 1..21: mol_type = other DNA
tcgactgtgtcatgacaagga

SEQ ID NO: 318 - DNA, 21 bp, synthetic construct
  source 1..21: mol_type = other DNA
cctctccaacaggtattcaga

SEQ ID NO: 319 - DNA, 21 bp, synthetic construct
  source 1..21: mol_type = other DNA
gcaattcggcattttgaaaac

SEQ ID NO: 320 - DNA, 21 bp, synthetic construct
  source 1..21: mol_type = other DNA
aaaacaaatttgccgtggaaa

SEQ ID NO: 321 - DNA, 21 bp, synthetic construct
  source 1..21: mol_type = other DNA
ccgtggaaactttaatttgtt

SEQ ID NO: 322 - DNA, 21 bp, synthetic construct
  source 1..21: mol_type = other DNA
gccaactggtaccacatcatc

SEQ ID NO: 323 - DNA, 21 bp, synthetic construct
  source 1..21: mol_type = other DNA
tacaagtatgctcctcctaga

SEQ ID NO: 324 - DNA, 21 bp, synthetic construct
  source 1..21: mol_type = other DNA
cacttacttgaagtgcaaaat

SEQ ID NO: 325 - DNA, 21 bp, synthetic construct
  source 1..21: mol_type = other DNA
aatgcgatcagtaataaccat

SEQ ID NO: 326 - DNA, 21 bp, synthetic construct
  source 1..21: mol_type = other DNA
cttgtcatgacacagtcgata

SEQ ID NO: 327 - DNA, 21 bp, synthetic construct
  source 1..21: mol_type = other DNA
taagtttccttgtcatgacac

SEQ ID NO: 328 - DNA, 21 bp, synthetic construct
  source 1..21: mol_type = other DNA
tctgcgttgcagtttgtaagt

SEQ ID NO: 329 - DNA, 21 bp, synthetic construct
  source 1..21: mol_type = other DNA
atagtttctctgcgttgcagt

SEQ ID NO: 330 - DNA, 21 bp, synthetic construct
  source 1..21: mol_type = other DNA
aaaagtattacctttaatagt

SEQ ID NO: 331 - DNA, 21 bp, synthetic construct
  source 1..21: mol_type = other DNA
atatttaaaaagtattacctt

SEQ ID NO: 332 - DNA, 21 bp, synthetic construct
  source 1..21: mol_type = other DNA
aaaatgccgaattgcgaaaca

SEQ ID NO: 333 - DNA, 21 bp, synthetic construct
  source 1..21: mol_type = other DNA
ttttcaaaatgccgaattgcg

SEQ ID NO: 334 - DNA, 21 bp, synthetic construct
  source 1..21: mol_type = other DNA
cacggcaaatttgttttcaaa

SEQ ID NO: 335 - DNA, 21 bp, synthetic construct
  source 1..21: mol_type = other DNA
ttgactgttcaagaacaaatt

SEQ ID NO: 336 - DNA, 21 bp, synthetic construct
  source 1..21: mol_type = other DNA
cttttctcccagctcctgccc

SEQ ID NO: 337 - DNA, 21 bp, synthetic construct
  source 1..21: mol_type = other DNA
tcccagctcctgcccctccta

SEQ ID NO: 338 - DNA, 21 bp, synthetic construct
  source 1..21: mol_type = other DNA
cctctcccaggcttgaccact

SEQ ID NO: 339 - DNA, 21 bp, synthetic construct
  source 1..21: mol_type = other DNA
tttttcagattgggatcatct

SEQ ID NO: 340 - DNA, 21 bp, synthetic construct
  source 1..21: mol_type = other DNA
taggaaggaaacttactttgt

SEQ ID NO: 341 - DNA, 21 bp, synthetic construct
  source 1..21: mol_type = other DNA
gtctgggctgccaacatggta

SEQ ID NO: 342 - DNA, 21 bp, synthetic construct
  source 1..21: mol_type = other DNA
tattcctgcaggcaagcaccg

SEQ ID NO: 343 - DNA, 21 bp, synthetic construct
  source 1..21: mol_type = other DNA
tctgttcttctagggctacta

SEQ ID NO: 344 - DNA, 21 bp, synthetic construct
  source 1..21: mol_type = other DNA
ccctctgactctctcccagtc

SEQ ID NO: 345 - DNA, 21 bp, synthetic construct
  source 1..21: mol_type = other DNA
ctccttttgtaggcctatacc

SEQ ID NO: 346 - DNA, 21 bp, synthetic construct
  source 1..21: mol_type = other DNA
taggcctataccattcaagga

SEQ ID NO: 347 - DNA, 21 bp, synthetic construct
  source 1..21: mol_type = other DNA
ctccttgcagttgaccaagct

SEQ ID NO: 348 - DNA, 21 bp, synthetic construct
  source 1..21: mol_type = other DNA
acttgtatcttaacaggcatt

SEQ ID NO: 349 - DNA, 21 bp, synthetic construct
  source 1..21: mol_type = other DNA
gcaggtttggatgcatctgct

SEQ ID NO: 350 - DNA, 21 bp, synthetic construct
  source 1..21: mol_type = other DNA
tttctcccttaagttgattgg

SEQ ID NO: 351 - DNA, 21 bp, synthetic construct
  source 1..21: mol_type = other DNA
tcccttaagttgattggctgc

SEQ ID NO: 352 - DNA, 21 bp, synthetic construct
  source 1..21: mol_type = other DNA
tgtgttacaggctttcctcgg

SEQ ID NO: 353 - DNA, 21 bp, synthetic construct
  source 1..21: mol_type = other DNA
agcatgagcctgagggcttac

SEQ ID NO: 354 - DNA, 21 bp, synthetic construct
  source 1..21: mol_type = other DNA
ttacctgaccacctgcaaaga

SEQ ID NO: 355 - DNA, 21 bp, synthetic construct
  source 1..21: mol_type = other DNA
atcattaccccaatagccttt

SEQ ID NO: 356 - DNA, 21 bp, synthetic construct
  source 1..21: mol_type = other DNA
tcttcctcagactgctgagaa

SEQ ID NO: 357 - DNA, 21 bp, synthetic construct
  source 1..21: mol_type = other DNA
ctaggccgtttgagcaaggaa

SEQ ID NO: 358 - DNA, 21 bp, synthetic construct
  source 1..21: mol_type = other DNA
tttcctaggccgtttgagcaa

SEQ ID NO: 359 - DNA, 21 bp, synthetic construct
  source 1..21: mol_type = other DNA
atcagcactgaaaccaacctg

SEQ ID NO: 360 - DNA, 21 bp, synthetic construct
  source 1..21: mol_type = other DNA
agttggctggatctattattg

SEQ ID NO: 361 - DNA, 21 bp, synthetic construct
  source 1..21: mol_type = other DNA
aaaaatcttttcagttggctg

SEQ ID NO: 362 - DNA, 21 bp, synthetic construct
  source 1..21: mol_type = other DNA
aatcagattattcctatgcag

SEQ ID NO: 363 - DNA, 21 bp, synthetic construct
  source 1..21: mol_type = other DNA
tgtttttagggtggctccgga

SEQ ID NO: 364 - DNA, 21 bp, synthetic construct
  source 1..21: mol_type = other DNA
tttctgtttttagggtggctc

SEQ ID NO: 365 - DNA, 21 bp, synthetic construct
  source 1..21: mol_type = other DNA
tctctaacaggttggtttcag

SEQ ID NO: 366 - DNA, 21 bp, synthetic construct
  source 1..21: mol_type = other DNA
tctcttactatagattgctta

SEQ ID NO: 367 - DNA, 21 bp, synthetic construct
  source 1..21: mol_type = other DNA
cattggtttcttgaatagctt

SEQ ID NO: 368 - DNA, 21 bp, synthetic construct
  source 1..21: mol_type = other DNA
ttgaatagcttctcaataggt

SEQ ID NO: 369 - DNA, 21 bp, synthetic construct
  source 1..21: mol_type = other DNA
tgtagctccagctaggatgat

SEQ ID NO: 370 - DNA, 21 bp, synthetic construct
  source 1..21: mol_type = other DNA
ccttaactgctctgcgcccag

SEQ ID NO: 371 - DNA, 21 bp, synthetic construct
  source 1..21: mol_type = other DNA
ttaggtacacgatttttaagg

SEQ ID NO: 372 - DNA, 21 bp, synthetic construct
  source 1..21: mol_type = other DNA
cttcagatgaaatccacgatg

SEQ ID NO: 373 - DNA, 21 bp, synthetic construct
  source 1..21: mol_type = other DNA
gacaaggtcattgtgccctgc

SEQ ID NO: 374 - DNA, 21 bp, synthetic construct
  source 1..21: mol_type = other DNA
agatgtggctggtcatggaag

SEQ ID NO: 375 - DNA, 21 bp, synthetic construct
  source 1..21: mol_type = other DNA
ttgtactcgccgacggcaaag

SEQ ID NO: 376 - DNA, 21 bp, synthetic construct
  source 1..21: mol_type = other DNA
cagatctacgctgtgccttgg

SEQ ID NO: 377 - DNA, 21 bp, synthetic construct
  source 1..21: mol_type = other DNA
acagaaagcattctgctcttt

SEQ ID NO: 378 - DNA, 21 bp, synthetic construct
  source 1..21: mol_type = other DNA
ctttcacagaaagcattctgc

SEQ ID NO: 379 - DNA, 21 bp, synthetic construct
  source 1..21: mol_type = other DNA
acatgtgtagatcgtagctgg

SEQ ID NO: 380 - DNA, 21 bp, synthetic construct
  source 1..21: mol_type = other DNA
ccgtcggcgagtacaacaaag

SEQ ID NO: 381 - DNA, 21 bp, synthetic construct
  source 1..21: mol_type = other DNA
tcaccaagagcgagaaccctg

SEQ ID NO: 382 - DNA, 21 bp, synthetic construct
  source 1..21: mol_type = other DNA
ttacagtcgtgtctgttcaaa

SEQ ID NO: 383 - DNA, 21 bp, synthetic construct
  source 1..21: mol_type = other DNA
tactgtacatgcttccttttt

SEQ ID NO: 384 - DNA, 21 bp, synthetic construct
  source 1..21: mol_type = other DNA
caaatgacattatctgagagc

SEQ ID NO: 385 - DNA, 21 bp, synthetic construct
  source 1..21: mol_type = other DNA
ctcacgtggcacagcactccg

SEQ ID NO: 386 - DNA, 21 bp, synthetic construct
  source 1..21: mol_type = other DNA
tgtgggaaccatacctttagg

SEQ ID NO: 387 - DNA, 21 bp, synthetic construct
  source 1..21: mol_type = other DNA
taaaaaggaagcatgtacagt

SEQ ID NO: 388 - DNA, 21 bp, synthetic construct
  source 1..21: mol_type = other DNA
tcctatggcaggtcctcatag

SEQ ID NO: 389 - DNA, 21 bp, synthetic construct
  source 1..21: mol_type = other DNA
tagctggtgccgacaagaaag

SEQ ID NO: 390 - DNA, 21 bp, synthetic construct
  source 1..21: mol_type = other DNA
actttctagctggtgccgaca

SEQ ID NO: 391 - DNA, 21 bp, synthetic construct
  source 1..21: mol_type = other DNA
cataggtctggagggtgagcg

SEQ ID NO: 392 - DNA, 21 bp, synthetic construct
  source 1..21: mol_type = other DNA
atttacataggtctggagggt

SEQ ID NO: 393 - DNA, 21 bp, synthetic construct
  source 1..21: mol_type = other DNA
tgccttacagtctctcaagtc

SEQ ID NO: 394 - DNA, 21 bp, synthetic construct
  source 1..21: mol_type = other DNA
ttaccagtcacaagtaataag

SEQ ID NO: 395 - DNA, 21 bp, synthetic construct
  source 1..21: mol_type = other DNA
gaaatatgagattacggagca

SEQ ID NO: 396 - DNA, 21 bp, synthetic construct
  source 1..21: mol_type = other DNA
tttagaaatatgagattacgg

SEQ ID NO: 397 - DNA, 21 bp, synthetic construct
  source 1..21: mol_type = other DNA
tctttatttagaaatatgaga

SEQ ID NO: 398 - DNA, 21 bp, synthetic construct
  source 1..21: mol_type = other DNA
attttctctttatttagaaat

SEQ ID NO: 399 - DNA, 21 bp, synthetic construct
  source 1..21: mol_type = other DNA
ccccttaggacctctggtcct

SEQ ID NO: 400 - DNA, 21 bp, synthetic construct
  source 1..21: mol_type = other DNA
acttacagagggtggttttcc

SEQ ID NO: 401 - DNA, 21 bp, synthetic construct
  source 1..21: mol_type = other DNA
tttttaacttacagagggtgg

SEQ ID NO: 402 - DNA, 21 bp, synthetic construct
  source 1..21: mol_type = other DNA
tgtaggtattggcaagcttgc

SEQ ID NO: 403 - DNA, 21 bp, synthetic construct
  source 1..21: mol_type = other DNA
acactggctgcccggcaggcc

SEQ ID NO: 404 - DNA, 21 bp, synthetic construct
  source 1..21: mol_type = other DNA
tgtgtaggttacgttatatat

SEQ ID NO: 405 - DNA, 21 bp, synthetic construct
  source 1..21: mol_type = other DNA
ctattctaggagcgagctgga

SEQ ID NO: 406 - DNA, 21 bp, synthetic construct
  source 1..21: mol_type = other DNA
cctctgcaacggactgaaggc

SEQ ID NO: 407 - DNA, 21 bp, synthetic construct
  source 1..21: mol_type = other DNA
ctggccggtcacctcgaaggt

SEQ ID NO: 408 - DNA, 21 bp, synthetic construct
  source 1..21: mol_type = other DNA
cctgtaggctcatgtagcctc

SEQ ID NO: 409 - DNA, 21 bp, synthetic construct
  source 1..21: mol_type = other DNA
ctcagtcgccaatatgcagct

SEQ ID NO: 410 - DNA, 21 bp, synthetic construct
  source 1..21: mol_type = other DNA
tttactcagtcgccaatatgc

SEQ ID NO: 411 - DNA, 21 bp, synthetic construct
  source 1..21: mol_type = other DNA
ccccctagcgtctgaccaaac

SEQ ID NO: 412 - DNA, 21 bp, synthetic construct
  source 1..21: mol_type = other DNA
ccccgtacgagcggcgcgcca

SEQ ID NO: 413 - DNA, 21 bp, synthetic construct
  source 1..21: mol_type = other DNA
ctagtatacctcttcctcttc

SEQ ID NO: 414 - DNA, 21 bp, synthetic construct
  source 1..21: mol_type = other DNA
ctcaccttggcttccccaaaa

SEQ ID NO: 415 - DNA, 21 bp, synthetic construct
  source 1..21: mol_type = other DNA
aaatcttaccttccgtgcctt

SEQ ID NO: 416 - DNA, 21 bp, synthetic construct
  source 1..21: mol_type = other DNA
tctgttacaggaattaacaat

SEQ ID NO: 417 - DNA, 21 bp, synthetic construct
  source 1..21: mol_type = other DNA
cctctcatctctcaggtcgat

SEQ ID NO: 418 - DNA, 21 bp, synthetic construct
  source 1..21: mol_type = other DNA
taccctgtagatcgaagattt

SEQ ID NO: 419 - DNA, 21 bp, synthetic construct
  source 1..21: mol_type = other DNA
ggctatgtccaaactgggtct

SEQ ID NO: 420 - DNA, 21 bp, synthetic construct
  source 1..21: mol_type = other DNA
tcttctttaggctatgtccaa

SEQ ID NO: 421 - DNA, 21 bp, synthetic construct
  source 1..21: mol_type = other DNA
tcttcttagctggcggcagca

SEQ ID NO: 422 - DNA, 21 bp, synthetic construct
  source 1..21: mol_type = other DNA
gacatcaggcttgatggtatc

SEQ ID NO: 423 - DNA, 21 bp, synthetic construct
  source 1..21: mol_type = other DNA
ccatgctagatgacagaagtg

SEQ ID NO: 424 - DNA, 21 bp, synthetic construct
  source 1..21: mol_type = other DNA
ttaaattcttctgccctatca

SEQ ID NO: 425 - DNA, 21 bp, synthetic construct
  source 1..21: mol_type = other DNA
tcttgcagtgtgcccagctgg

SEQ ID NO: 426 - DNA, 21 bp, synthetic construct
  source 1..21: mol_type = other DNA
tcattgatgataagggtattc

SEQ ID NO: 427 - DNA, 21 bp, synthetic construct
  source 1..21: mol_type = other DNA
ccaggggcctttttatcattg

SEQ ID NO: 428 - DNA, 21 bp, synthetic construct
  source 1..21: mol_type = other DNA
atctcttttcccaggggcctt

SEQ ID NO: 429 - DNA, 21 bp, synthetic construct
  source 1..21: mol_type = other DNA
ctttcatctcttttcccaggg

SEQ ID NO: 430 - DNA, 21 bp, synthetic construct
  source 1..21: mol_type = other DNA
gtatcagacccgaagcgcacc

SEQ ID NO: 431 - DNA, 21 bp, synthetic construct
  source 1..21: mol_type = other DNA
ccatagggtcaatacacctaa

SEQ ID NO: 432 - DNA, 21 bp, synthetic construct
  source 1..21: mol_type = other DNA
ccttttgccatagggtcaata

SEQ ID NO: 433 - DNA, 21 bp, synthetic construct
  source 1..21: mol_type = other DNA
agtgatagggcagaagaattt

SEQ ID NO: 434 - DNA, 21 bp, synthetic construct
  source 1..21: mol_type = other DNA
ccctcttgacttcacctttgt

SEQ ID NO: 435 - DNA, 21 bp, synthetic construct
  source 1..21: mol_type = other DNA
cccccaggaaaatatgttgtg

SEQ ID NO: 436 - DNA, 21 bp, synthetic construct
  source 1..21: mol_type = other DNA
ccttctcggtcacatactggc

SEQ ID NO: 437 - DNA, 21 bp, synthetic construct
  source 1..21: mol_type = other DNA
gcccagtccaaggtaacttta

SEQ ID NO: 438 - DNA, 21 bp, synthetic construct
  source 1..21: mol_type = other DNA
tttccatcaatttcaccgtct

SEQ ID NO: 439 - DNA, 21 bp, synthetic construct
  source 1..21: mol_type = other DNA
catcaatttcaccgtcttcca

SEQ ID NO: 440 - DNA, 21 bp, synthetic construct
  source 1..21: mol_type = other DNA
accgtcttccatggcctcctt

SEQ ID NO: 441 - DNA, 21 bp, synthetic construct
  source 1..21: mol_type = other DNA
gcatcctcctcactgttgaag

SEQ ID NO: 442 - DNA, 21 bp, synthetic construct
  source 1..21: mol_type = other DNA
gaggacccagtttcccggtca

SEQ ID NO: 443 - DNA, 21 bp, synthetic construct
  source 1..21: mol_type = other DNA
ccggtcagtaactatccttgc

SEQ ID NO: 444 - DNA, 21 bp, synthetic construct
  source 1..21: mol_type = other DNA
atgtctcttcagtggtatcct

SEQ ID NO: 445 - DNA, 21 bp, synthetic construct
  source 1..21: mol_type = other DNA
acaaacagagttttggatggc

SEQ ID NO: 446 - DNA, 21 bp, synthetic construct
  source 1..21: mol_type = other DNA
gtggcagaggccggggaggct

SEQ ID NO: 447 - DNA, 21 bp, synthetic construct
  source 1..21: mol_type = other DNA
gaggacgaggtggtggtagag

SEQ ID NO: 448 - DNA, 21 bp, synthetic construct
  source 1..21: mol_type = other DNA
tagacttcaacagtgaggagg

SEQ ID NO: 449 - DNA, 21 bp, synthetic construct
  source 1..21: mol_type = other DNA
gttttgtagacttcaacagtg

SEQ ID NO: 450 - DNA, 21 bp, synthetic construct
  source 1..21: mol_type = other DNA
gtgttctaggtttggttttgt

SEQ ID NO: 451 - DNA, 21 bp, synthetic construct
  source 1..21: mol_type = other DNA
atttggtgttctaggtttggt

SEQ ID NO: 452 - DNA, 21 bp, synthetic construct
  source 1..21: mol_type = other DNA
acggctccgttcgggcaagga

SEQ ID NO: 453 - DNA, 21 bp, synthetic construct
  source 1..21: mol_type = other DNA
tcaaaggcctgtctgaggata

SEQ ID NO: 454 - DNA, 21 bp, synthetic construct
  source 1..21: mol_type = other DNA
cttcccagagccatccaaaac

SEQ ID NO: 455 - DNA, 21 bp, synthetic construct
  source 1..21: mol_type = other DNA
tagatgaaagaaacaatcatg

SEQ ID NO: 456 - DNA, 21 bp, synthetic construct
  source 1..21: mol_type = other DNA
ctcttctccctgactttaggg

SEQ ID NO: 457 - DNA, 21 bp, synthetic construct
  source 1..21: mol_type = other DNA
gggaactgctcgcagaaagaa

SEQ ID NO: 458 - DNA, 21 bp, synthetic construct
  source 1..21: mol_type = other DNA
ttttcttaataggtgaatatg

SEQ ID NO: 459 - DNA, 21 bp, synthetic construct
  source 1..21: mol_type = other DNA
ttaataggtgaatatgtttac

SEQ ID NO: 460 - DNA, 21 bp, synthetic construct
  source 1..21: mol_type = other DNA
cattttcctttcatagctgtg

SEQ ID NO: 461 - DNA, 21 bp, synthetic construct
  source 1..21: mol_type = other DNA
ctttcatagctgtggatggaa

SEQ ID NO: 462 - DNA, 21 bp, synthetic construct
  source 1..21: mol_type = other DNA
atagctgtggatggaaaagca

SEQ ID NO: 463 - DNA, 21 bp, synthetic construct
  source 1..21: mol_type = other DNA
tactcttttccttttcctaga

SEQ ID NO: 464 - DNA, 21 bp, synthetic construct
  source 1..21: mol_type = other DNA
cttttcctagatcttgtggag

SEQ ID NO: 465 - DNA, 21 bp, synthetic construct
  source 1..21: mol_type = other DNA
ctagatcttgtggagaatttt

SEQ ID NO: 466 - DNA, 21 bp, synthetic construct
  source 1..21: mol_type = other DNA
atacttgcctcttcaatacca

SEQ ID NO: 467 - DNA, 21 bp, synthetic construct
  source 1..21: mol_type = other DNA
ggggctatcattgtagtgagt

SEQ ID NO: 468 - DNA, 21 bp, synthetic construct
  source 1..21: mol_type = other DNA
agcccatcaaggcagacccca

SEQ ID NO: 469 - DNA, 21 bp, synthetic construct
  source 1..21: mol_type = other DNA
agttttggaactccccaaaga

SEQ ID NO: 470 - DNA, 21 bp, synthetic construct
  source 1..21: mol_type = other DNA
gaactccccaaagagctgtca

SEQ ID NO: 471 - DNA, 21 bp, synthetic construct
  source 1..21: mol_type = other DNA
cccctctgcttcgtctttctc

SEQ ID NO: 472 - DNA, 21 bp, synthetic construct
  source 1..21: mol_type = other DNA
tccacccccgggagaccacga

SEQ ID NO: 473 - DNA, 21 bp, synthetic construct
  source 1..21: mol_type = other DNA
atgtgcctgttctcaacctct

SEQ ID NO: 474 - DNA, 21 bp, synthetic construct
  source 1..21: mol_type = other DNA
tgacagctctttggggagttc

SEQ ID NO: 475 - DNA, 21 bp, synthetic construct
  source 1..21: mol_type = other DNA
actaagcttaattgctttctg

SEQ ID NO: 476 - DNA, 21 bp, synthetic construct
  source 1..21: mol_type = other DNA
tggaacaggatctgaaactgg

SEQ ID NO: 477 - DNA, 21 bp, synthetic construct
  source 1..21: mol_type = other DNA
tacccatcaacactggtaaga

SEQ ID NO: 478 - DNA, 21 bp, synthetic construct
  source 1..21: mol_type = other DNA
ttcttttaggatgtggatgta

SEQ ID NO: 479 - DNA, 21 bp, synthetic construct
  source 1..21: mol_type = other DNA
ggatgtggatgtagaagaggc

SEQ ID NO: 480 - DNA, 21 bp, synthetic construct
  source 1..21: mol_type = other DNA
ccgccttaaatccacagcata

SEQ ID NO: 481 - DNA, 21 bp, synthetic construct
  source 1..21: mol_type = other DNA
attaagttctagattttgtgc

SEQ ID NO: 482 - DNA, 21 bp, synthetic construct
  source 1..21: mol_type = other DNA
tggtttcattaagttctagat

SEQ ID NO: 483 - DNA, 21 bp, synthetic construct
  source 1..21: mol_type = other DNA
agatcctgttccagaaagcaa

SEQ ID NO: 484 - DNA, 21 bp, synthetic construct
  source 1..21: mol_type = other DNA
aagtacctgttgggatatcca

SEQ ID NO: 485 - DNA, 21 bp, synthetic construct
  source 1..21: mol_type = other DNA
tcttttaaagtacctgttggg

SEQ ID NO: 486 - DNA, 21 bp, synthetic construct
  source 1..21: mol_type = other DNA
agctgatcaaggagatgttca

SEQ ID NO: 487 - DNA, 21 bp, synthetic construct
  source 1..21: mol_type = other DNA
cttttcagctgatcaaggaga

SEQ ID NO: 488 - DNA, 21 bp, synthetic construct
  source 1..21: mol_type = other DNA
gcatcattaacagctcaggct

SEQ ID NO: 489 - DNA, 21 bp, synthetic construct
  source 1..21: mol_type = other DNA
tgaacagtttagcatcattaa

SEQ ID NO: 490 - DNA, 21 bp, synthetic construct
  source 1..21: mol_type = other DNA
ttgttttctgaacagtttagc

SEQ ID NO: 491 - DNA, 21 bp, synthetic construct
  source 1..21: mol_type = other DNA
ccggaattgtctcttctttgt

SEQ ID NO: 492 - DNA, 21 bp, synthetic construct
  source 1..21: mol_type = other DNA
aatttaccggaattgtctctt

SEQ ID NO: 493 - DNA, 21 bp, synthetic construct
  source 1..21: mol_type = other DNA
tcttttccatgtgatttttta

SEQ ID NO: 494 - DNA, 21 bp, synthetic construct
  source 1..21: mol_type = other DNA
tttgtcttttccatgtgattt

SEQ ID NO: 495 - DNA, 21 bp, synthetic construct
  source 1..21: mol_type = other DNA
gacctctccagtgtgttaatg

SEQ ID NO: 496 - DNA, 21 bp, synthetic construct
  source 1..21: mol_type = other DNA
ttccactttagacctctccag

SEQ ID NO: 497 - DNA, 21 bp, synthetic construct
  source 1..21: mol_type = other DNA
taaccaagtgctctgtagttt

SEQ ID NO: 498 - DNA, 21 bp, synthetic construct
  source 1..21: mol_type = other DNA
tcttctaggtctataagaagg

SEQ ID NO: 499 - DNA, 21 bp, synthetic construct
  source 1..21: mol_type = other DNA
agtaagtgttcacttacgttc

SEQ ID NO: 500 - DNA, 21 bp, synthetic construct
  source 1..21: mol_type = other DNA
ccttaattcttgcttctcaga

SEQ ID NO: 501 - DNA, 21 bp, synthetic construct
  source 1..21: mol_type = other DNA
agctgagcaatggacgtggac

SEQ ID NO: 502 - DNA, 21 bp, synthetic construct
  source 1..21: mol_type = other DNA
aaggacttaaaggagaagaag

SEQ ID NO: 503 - DNA, 21 bp, synthetic construct
  source 1..21: mol_type = other DNA
tgtcgaggagaatgaggaaaa

SEQ ID NO: 504 - DNA, 21 bp, synthetic construct
  source 1..21: mol_type = other DNA
attctctccaggtgaggaaga

SEQ ID NO: 505 - DNA, 21 bp, synthetic construct
  source 1..21: mol_type = other DNA
tctgcttaggatgacgatgtc

SEQ ID NO: 506 - DNA, 21 bp, synthetic construct
  source 1..21: mol_type = other DNA
gcatccggagaaatgaaaaga

SEQ ID NO: 507 - DNA, 21 bp, synthetic construct
  source 1..21: mol_type = other DNA
tccacaggtgcgggagtatga

SEQ ID NO: 508 - DNA, 21 bp, synthetic construct
  source 1..21: mol_type = other DNA
agcatcgcagacaagaagcgc

SEQ ID NO: 509 - DNA, 21 bp, synthetic construct
  source 1..21: mol_type = other DNA
agtatgatgggatcatccttc

SEQ ID NO: 510 - DNA, 21 bp, synthetic construct
  source 1..21: mol_type = other DNA
cggatgcgaagttcccgcatg

SEQ ID NO: 511 - DNA, 21 bp, synthetic construct
  source 1..21: mol_type = other DNA
tccggatgccaaaggatctga

SEQ ID NO: 512 - DNA, 21 bp, synthetic construct
  source 1..21: mol_type = other DNA
atttctccggatgccaaagga

SEQ ID NO: 513 - DNA, 21 bp, synthetic construct
  source 1..21: mol_type = other DNA
gacccttctccaagatttctt

SEQ ID NO: 514 - DNA, 21 bp, synthetic construct
  source 1..21: mol_type = other DNA
ttaactcatactcccgcacct

SEQ ID NO: 515 - DNA, 21 bp, synthetic construct
  source 1..21: mol_type = other DNA
ccttctgctggaaccagcgca

SEQ ID NO: 516 - DNA, 21 bp, synthetic construct
  source 1..21: mol_type = other DNA
tctttttttccaacagaattt

SEQ ID NO: 517 - DNA, 21 bp, synthetic construct
  source 1..21: mol_type = other DNA
caacagaatttgccattttca

SEQ ID NO: 518 - DNA, 21 bp, synthetic construct
  source 1..21: mol_type = other DNA
ttgaggccctcagcactagtt

SEQ ID NO: 519 - DNA, 21 bp, synthetic construct
  source 1..21: mol_type = other DNA
cggccagcaggggcatctctg

SEQ ID NO: 520 - DNA, 21 bp, synthetic construct
  source 1..21: mol_type = other DNA
tgggttacttacattcatggc

SEQ ID NO: 521 - DNA, 21 bp, synthetic construct
  source 1..21: mol_type = other DNA
tctgcctgcagcctgtggagc

SEQ ID NO: 522 - DNA, 21 bp, synthetic construct
  source 1..21: mol_type = other DNA
ttctccctacctagccctgga

SEQ ID NO: 523 - DNA, 21 bp, synthetic construct
  source 1..21: mol_type = other DNA
cattgctccttagatccacat

SEQ ID NO: 524 - DNA, 21 bp, synthetic construct
  source 1..21: mol_type = other DNA
cctccccaaaaggaagagttc

SEQ ID NO: 525 - DNA, 21 bp, synthetic construct
  source 1..21: mol_type = other DNA
ctgcggtaatcatgaggataa

SEQ ID NO: 526 - DNA, 21 bp, synthetic construct
  source 1..21: mol_type = other DNA
agttctgggaaaatggtgtgc

SEQ ID NO: 527 - DNA, 21 bp, synthetic construct
  source 1..21: mol_type = other DNA
ctttccctagtgaagaacagt

SEQ ID NO: 528 - DNA, 21 bp, synthetic construct
  source 1..21: mol_type = other DNA
cctagtgaagaacagtccaga

SEQ ID NO: 529 - DNA, 21 bp, synthetic construct
  source 1..21: mol_type = other DNA
cagctaagttcttggacttca

SEQ ID NO: 530 - DNA, 21 bp, synthetic construct
  source 1..21: mol_type = other DNA
ctataaggttagaaggccttg

SEQ ID NO: 531 - DNA, 21 bp, synthetic construct
  source 1..21: mol_type = other DNA
caattttccttctagttatga

SEQ ID NO: 532 - DNA, 21 bp, synthetic construct
  source 1..21: mol_type = other DNA
cttctagttatgagccagagt

SEQ ID NO: 533 - DNA, 21 bp, synthetic construct
  source 1..21: mol_type = other DNA
ctggtttaatctacagaatga

SEQ ID NO: 534 - DNA, 21 bp, synthetic construct
  source 1..21: mol_type = other DNA
atctacagaatgatcaaaccc

SEQ ID NO: 535 - DNA, 21 bp, synthetic construct
  source 1..21: mol_type = other DNA
tttctggaaaagttgtattaa

SEQ ID NO: 536 - DNA, 21 bp, synthetic construct
  source 1..21: mol_type = other DNA
tggaaaagttgtattaacagg

SEQ ID NO: 537 - DNA, 21 bp, synthetic construct
  source 1..21: mol_type = other DNA
ggtcaagtttacaaccaagat

SEQ ID NO: 538 - DNA, 21 bp, synthetic construct
  source 1..21: mol_type = other DNA
gggcacgaagtgcaatggtct

SEQ ID NO: 539 - DNA, 21 bp, synthetic construct
  source 1..21: mol_type = other DNA
ccagaactgaaaatcagtgcc

SEQ ID NO: 540 - DNA, 21 bp, synthetic construct
  source 1..21: mol_type = other DNA
ttacggctacctcttggctcc

SEQ ID NO: 541 - DNA, 21 bp, synthetic construct
  source 1..21: mol_type = other DNA
ttgctgccagtctggactgtt

SEQ ID NO: 542 - DNA, 21 bp, synthetic construct
  source 1..21: mol_type = other DNA
agacttacctactaaattgtt

SEQ ID NO: 543 - DNA, 21 bp, synthetic construct
  source 1..21: mol_type = other DNA
atcattctgtagattaaacca

SEQ ID NO: 544 - DNA, 21 bp, synthetic construct
  source 1..21: mol_type = other DNA
cagaaacaaaaataaggagaa

SEQ ID NO: 545 - DNA, 21 bp, synthetic construct
  source 1..21: mol_type = other DNA
aaatgcttcataaatttctgc

SEQ ID NO: 546 - DNA, 21 bp, synthetic construct
  source 1..21: mol_type = other DNA
ctcagccagcccccaatcttc

SEQ ID NO: 547 - DNA, 21 bp, synthetic construct
  source 1..21: mol_type = other DNA
tcccaatctgtgtagttagca

SEQ ID NO: 548 - DNA, 21 bp, synthetic construct
  source 1..21: mol_type = other DNA
gggtaattctccatctgctgc

SEQ ID NO: 549 - DNA, 21 bp, synthetic construct
  source 1..21: mol_type = other DNA
ggaattgtctttgcctgctgc

SEQ ID NO: 550 - DNA, 21 bp, synthetic construct
  source 1..21: mol_type = other DNA
cttctaggttttgggaattgt

SEQ ID NO: 551 - DNA, 21 bp, synthetic construct
  source 1..21: mol_type = other DNA
tgcctgccaccttcagggctg

SEQ ID NO: 552 - DNA, 21 bp, synthetic construct
  source 1..21: mol_type = other DNA
aacgagaaggcgatccataag

SEQ ID NO: 553 - DNA, 21 bp, synthetic construct
  source 1..21: mol_type = other DNA
agtgctgtggggctgctaact

SEQ ID NO: 554 - DNA, 21 bp, synthetic construct
  source 1..21: mol_type = other DNA
ttccctcccccagtttaagtg

SEQ ID NO: 555 - DNA, 21 bp, synthetic construct
  source 1..21: mol_type = other DNA
ataacaacttccggcagcaga

SEQ ID NO: 556 - DNA, 21 bp, synthetic construct
  source 1..21: mol_type = other DNA
tgtctcttatcatgttggtgg

SEQ ID NO: 557 - DNA, 21 bp, synthetic construct
  source 1..21: mol_type = other DNA
ccatctttctgtctcttatca

SEQ ID NO: 558 - DNA, 21 bp, synthetic construct
  source 1..21: mol_type = other DNA
ctcctgcagtttgccatcttt

SEQ ID NO: 559 - DNA, 21 bp, synthetic construct
  source 1..21: mol_type = other DNA
tgggctgctgcggggcctgca

SEQ ID NO: 560 - DNA, 21 bp, synthetic construct
  source 1..21: mol_type = other DNA
tgttttcagaacgacaccgta

SEQ ID NO: 561 - DNA, 21 bp, synthetic construct
  source 1..21: mol_type = other DNA
agaacgacaccgtaactatcc

SEQ ID NO: 562 - DNA, 21 bp, synthetic construct
  source 1..21: mol_type = other DNA
ggtcattgatgtccttcaccc

SEQ ID NO: 563 - DNA, 21 bp, synthetic construct
  source 1..21: mol_type = other DNA
tcattcagcatggcctgtatg

SEQ ID NO: 564 - DNA, 21 bp, synthetic construct
  source 1..21: mol_type = other DNA
cctcttcttctggattacaga

SEQ ID NO: 565 - DNA, 21 bp, synthetic construct
  source 1..21: mol_type = other DNA
tagtgcggatagttacggtgt

SEQ ID NO: 566 - DNA, 21 bp, synthetic construct
  source 1..21: mol_type = other DNA
cttaatgaactataccttttt

SEQ ID NO: 567 - DNA, 21 bp, synthetic construct
  source 1..21: mol_type = other DNA
gggctgtgcccaaatgagctt

SEQ ID NO: 568 - DNA, 21 bp, synthetic construct
  source 1..21: mol_type = other DNA
ttccaggaaaatgatgaagtt

SEQ ID NO: 569 - DNA, 21 bp, synthetic construct
  source 1..21: mol_type = other DNA
tacccaatgacggttgcttga

SEQ ID NO: 570 - DNA, 21 bp, synthetic construct
  source 1..21: mol_type = other DNA
agaggagttgaagccaaacag

SEQ ID NO: 571 - DNA, 21 bp, synthetic construct
  source 1..21: mol_type = other DNA
tatttcagaggagttgaagcc

SEQ ID NO: 572 - DNA, 21 bp, synthetic construct
  source 1..21: mol_type = other DNA
ggcaagtgtcgtggacttcgt

SEQ ID NO: 573 - DNA, 21 bp, synthetic construct
  source 1..21: mol_type = other DNA
atttttaggcaagtgtcgtgg

SEQ ID NO: 574 - DNA, 21 bp, synthetic construct
  source 1..21: mol_type = other DNA
tccaggaagttgtccagggca

SEQ ID NO: 575 - DNA, 21 bp, synthetic construct
  source 1..21: mol_type = other DNA
aggcccttgcgcttgcgggtc

SEQ ID NO: 576 - DNA, 21 bp, synthetic construct
  source 1..21: mol_type = other DNA
accactggcagatcctgcccg

SEQ ID NO: 577 - DNA, 21 bp, synthetic construct
  source 1..21: mol_type = other DNA
tggtcaaggcctatctgcccg

SEQ ID NO: 578 - DNA, 21 bp, synthetic construct
  source 1..21: mol_type = other DNA
aacaggaagcggggccacgtg

SEQ ID NO: 579 - DNA, 21 bp, synthetic construct
  source 1..21: mol_type = other DNA
ccttctggcagtgtccagagc

SEQ ID NO: 580 - DNA, 21 bp, synthetic construct
  source 1..21: mol_type = other DNA
tttcccttctggcagtgtcca

SEQ ID NO: 581 - DNA, 21 bp, synthetic construct
  source 1..21: mol_type = other DNA
cttctcccttctgcagggtga

SEQ ID NO: 582 - DNA, 21 bp, synthetic construct
  source 1..21: mol_type = other DNA
gcgtgctgggcctggacctct

SEQ ID NO: 583 - DNA, 21 bp, synthetic construct
  source 1..21: mol_type = other DNA
acaacttcctcatcaccaacg

SEQ ID NO: 584 - DNA, 21 bp, synthetic construct
  source 1..21: mol_type = other DNA
gcaacgagacgtggggcgtaa

SEQ ID NO: 585 - DNA, 21 bp, synthetic construct
  source 1..21: mol_type = other DNA
tgggtggatccaagtgccctt

SEQ ID NO: 586 - DNA, 21 bp, synthetic construct
  source 1..21: mol_type = other DNA
ctccaagtctcacctgccaga

SEQ ID NO: 587 - DNA, 21 bp, synthetic construct
  source 1..21: mol_type = other DNA
ttacgccccacgtctcgttgc

SEQ ID NO: 588 - DNA, 21 bp, synthetic construct
  source 1..21: mol_type = other DNA
tccttcatttgtttctctgct

SEQ ID NO: 589 - DNA, 21 bp, synthetic construct
  source 1..21: mol_type = other DNA
ttgtcttcttcctcctcctta

SEQ ID NO: 590 - DNA, 21 bp, synthetic construct
  source 1..21: mol_type = other DNA
tcctcatcatcctccttgtcc

SEQ ID NO: 591 - DNA, 21 bp, synthetic construct
  source 1..21: mol_type = other DNA
tatgcccagggaaggaggcgc

SEQ ID NO: 592 - DNA, 21 bp, synthetic construct
  source 1..21: mol_type = other DNA
aggcttattcaaacctcctta

SEQ ID NO: 593 - DNA, 21 bp, synthetic construct
  source 1..21: mol_type = other DNA
aggtgagctccaaggaagtga

SEQ ID NO: 594 - DNA, 21 bp, synthetic construct
  source 1..21: mol_type = other DNA
cttctttttcaggtgagctcc

SEQ ID NO: 595 - DNA, 21 bp, synthetic construct
  source 1..21: mol_type = other DNA
cttcagatgacggtcgaacca

SEQ ID NO: 596 - DNA, 21 bp, synthetic construct
  source 1..21: mol_type = other DNA
cagaagtgccggacgtcgggc

SEQ ID NO: 597 - DNA, 21 bp, synthetic construct
  source 1..21: mol_type = other DNA
cagttcctgacggagctgacc

SEQ ID NO: 598 - DNA, 21 bp, synthetic construct
  source 1..21: mol_type = other DNA
tttcggatcttctcgccctca

SEQ ID NO: 599 - DNA, 21 bp, synthetic construct
  source 1..21: mol_type = other DNA
ggatcttctcgccctcagagc

SEQ ID NO: 600 - DNA, 21 bp, synthetic construct
  source 1..21: mol_type = other DNA
tctacattgcctacagtgacg

SEQ ID NO: 601 - DNA, 21 bp, synthetic construct
  source 1..21: mol_type = other DNA
atcccaggaacaccatgaaga

SEQ ID NO: 602 - DNA, 21 bp, synthetic construct
  source 1..21: mol_type = other DNA
tgctttcatcccaggaacacc

SEQ ID NO: 603 - DNA, 21 bp, synthetic construct
  source 1..21: mol_type = other DNA
tcaacaatgtcattccaccca

SEQ ID NO: 604 - DNA, 21 bp, synthetic construct
  source 1..21: mol_type = other DNA
tttgtcaacaatgtcattcca

SEQ ID NO: 605 - DNA, 21 bp, synthetic construct
  source 1..21: mol_type = other DNA
cagttggtcagttctacttct

SEQ ID NO: 606 - DNA, 21 bp, synthetic construct
  source 1..21: mol_type = other DNA
ttgcatcttgtatcttttgca

SEQ ID NO: 607 - DNA, 21 bp, synthetic construct
  source 1..21: mol_type = other DNA
tcaggtgatagtagaaaaggc

SEQ ID NO: 608 - DNA, 21 bp, synthetic construct
  source 1..21: mol_type = other DNA
atctctttatcaggtgatagt

SEQ ID NO: 609 - DNA, 21 bp, synthetic construct
  source 1..21: mol_type = other DNA
ataatctgccactcttggcag

SEQ ID NO: 610 - DNA, 21 bp, synthetic construct
  source 1..21: mol_type = other DNA
taacccagattgaaaaagaag

SEQ ID NO: 611 - DNA, 21 bp, synthetic construct
  source 1..21: mol_type = other DNA
gtattctcttaacagaagact

SEQ ID NO: 612 - DNA, 21 bp, synthetic construct
  source 1..21: mol_type = other DNA
gagaagcttacctcttcagga

SEQ ID NO: 613 - DNA, 21 bp, synthetic construct
  source 1..21: mol_type = other DNA
aattatttattacagtatttt

SEQ ID NO: 614 - DNA, 21 bp, synthetic construct
  source 1..21: mol_type = other DNA
ttacagtattttgatgaaaat

SEQ ID NO: 615 - DNA, 21 bp, synthetic construct
  source 1..21: mol_type = other DNA
ggatttgacgaaacgttcgag

SEQ ID NO: 616 - DNA, 21 bp, synthetic construct
  source 1..21: mol_type = other DNA
acgaaacgttcgagtcaaacg

SEQ ID NO: 617 - DNA, 21 bp, synthetic construct
  source 1..21: mol_type = other DNA
aggttcccgatatggatgatg

SEQ ID NO: 618 - DNA, 21 bp, synthetic construct
  source 1..21: mol_type = other DNA
tttcaggaggatgaaggagaa

SEQ ID NO: 619 - DNA, 21 bp, synthetic construct
  source 1..21: mol_type = other DNA
aggaggatgaaggagaagatg

SEQ ID NO: 620 - DNA, 21 bp, synthetic construct
  source 1..21: mol_type = other DNA
ttttacctctccttcctcccc

SEQ ID NO: 621 - DNA, 21 bp, synthetic construct
  source 1..21: mol_type = other DNA
gccaaattttcttttacctct

SEQ ID NO: 622 - DNA, 21 bp, synthetic construct
  source 1..21: mol_type = other DNA
cagaccacagtccatgccatc

SEQ ID NO: 623 - DNA, 21 bp, synthetic construct
  source 1..21: mol_type = other DNA
atcttctaggtatgacaacga

SEQ ID NO: 624 - DNA, 21 bp, synthetic construct
  source 1..21: mol_type = other DNA
tttgttgtaggaggataagat

SEQ ID NO: 625 - DNA, 21 bp, synthetic construct
  source 1..21: mol_type = other DNA
ttgtaggaggataagatcaat

SEQ ID NO: 626 - DNA, 21 bp, synthetic construct
  source 1..21: mol_type = other DNA
tagctgaggagaagaaagtgg

SEQ ID NO: 627 - DNA, 21 bp, synthetic construct
  source 1..21: mol_type = other DNA
ccaccatcaccttacctttgc

SEQ ID NO: 628 - DNA, 21 bp, synthetic construct
  source 1..21: mol_type = other DNA
ctacctggagcagcagcagtg

SEQ ID NO: 629 - DNA, 21 bp, synthetic construct
  source 1..21: mol_type = other DNA
ctcttaaggggcgcagactcg

SEQ ID NO: 630 - DNA, 21 bp, synthetic construct
  source 1..21: mol_type = other DNA
tagggatcaagcatgaattgc

SEQ ID NO: 631 - DNA, 21 bp, synthetic construct
  source 1..21: mol_type = other DNA
ttctttatagggatcaagcat

SEQ ID NO: 632 - DNA, 21 bp, synthetic construct
  source 1..21: mol_type = other DNA
tgtccagggcccccgagtctg

SEQ ID NO: 633 - DNA, 21 bp, synthetic construct
  source 1..21: mol_type = other DNA
ctcttggtctcccgcagcccg

SEQ ID NO: 634 - DNA, 21 bp, synthetic construct
  source 1..21: mol_type = other DNA
cattatttattttaacccact

SEQ ID NO: 635 - DNA, 21 bp, synthetic construct
  source 1..21: mol_type = other DNA
ttttaacccacttccttgtac

SEQ ID NO: 636 - DNA, 21 bp, synthetic construct
  source 1..21: mol_type = other DNA
acccacttccttgtacttaca

SEQ ID NO: 637 - DNA, 21 bp, synthetic construct
  source 1..21: mol_type = other DNA
cctggtagtttttgaaattag

SEQ ID NO: 638 - DNA, 21 bp, synthetic construct
  source 1..21: mol_type = other DNA
gaaatggaaaaatgtgtaagt

SEQ ID NO: 639 - DNA, 21 bp, synthetic construct
  source 1..21: mol_type = other DNA
cttcccaagttctttattggt

SEQ ID NO: 640 - DNA, 21 bp, synthetic construct
  source 1..21: mol_type = other DNA
tttgcttcccaagttctttat

SEQ ID NO: 641 - DNA, 21 bp, synthetic construct
  source 1..21: mol_type = other DNA
gaatcaaagggaaacttgaag

SEQ ID NO: 642 - DNA, 21 bp, synthetic construct
  source 1..21: mol_type = other DNA
ttaatgcagatggtcagtagg

SEQ ID NO: 643 - DNA, 21 bp, synthetic construct
  source 1..21: mol_type = other DNA
ctacctttcatctcgccttta

SEQ ID NO: 644 - DNA, 21 bp, synthetic construct
  source 1..21: mol_type = other DNA
ttgttcactatgactcctgca

SEQ ID NO: 645 - DNA, 21 bp, synthetic construct
  source 1..21: mol_type = other DNA
ctcacccttttttctgagctc

SEQ ID NO: 646 - DNA, 21 bp, synthetic construct
  source 1..21: mol_type = other DNA
atgcaggttctgccattacag

SEQ ID NO: 647 - DNA, 21 bp, synthetic construct
  source 1..21: mol_type = other DNA
tttttttaatgcaggttctgc

SEQ ID NO: 648 - DNA, 21 bp, synthetic construct
  source 1..21: mol_type = other DNA
ttctctcagtacatccagcag

SEQ ID NO: 649 - DNA, 21 bp, synthetic construct
  source 1..21: mol_type = other DNA
actttctaggtcccgaacccc

SEQ ID NO: 650 - DNA, 21 bp, synthetic construct
  source 1..21: mol_type = other DNA
taggtcccgaacccctggtaa

SEQ ID NO: 651 - DNA, 21 bp, synthetic construct
  source 1..21: mol_type = other DNA
ttatgcaggttcgtgctgtaa

SEQ ID NO: 652 - DNA, 21 bp, synthetic construct
  source 1..21: mol_type = other DNA
gtattttcctttctaggatca

SEQ ID NO: 653 - DNA, 21 bp, synthetic construct
  source 1..21: mol_type = other DNA
ctttctaggatcaagcgtgct

SEQ ID NO: 654 - DNA, 21 bp, synthetic construct
  source 1..21: mol_type = other DNA
taggatcaagcgtgctttcct

SEQ ID NO: 655 - DNA, 21 bp, synthetic construct
  source 1..21: mol_type = other DNA
agaaatacttacagcctagtt

SEQ ID NO: 656 - DNA, 21 bp, synthetic construct
  source 1..21: mol_type = other DNA
acttacctgtcacgaacacat

SEQ ID NO: 657 - DNA, 21 bp, synthetic construct
  source 1..21: mol_type = other DNA
agcatttaacttacctgtcac

SEQ ID NO: 658 - DNA, 21 bp, synthetic construct
  source 1..21: mol_type = other DNA
tctttcagaatgttggctacc

SEQ ID NO: 659 - DNA, 21 bp, synthetic construct
  source 1..21: mol_type = other DNA
agaatgttggctaccagggta

SEQ ID NO: 660 - DNA, 21 bp, synthetic construct
  source 1..21: mol_type = other DNA
cacctctgtgtgtgtacgagc

SEQ ID NO: 661 - DNA, 21 bp, synthetic construct
  source 1..21: mol_type = other DNA
ttcaatatgtttttcagaaag

SEQ ID NO: 662 - DNA, 21 bp, synthetic construct
  source 1..21: mol_type = other DNA
agaaagtgttgtgaagagcga

SEQ ID NO: 663 - DNA, 21 bp, synthetic construct
  source 1..21: mol_type = other DNA
gctcccagcttatatggatcg

SEQ ID NO: 664 - DNA, 21 bp, synthetic construct
  source 1..21: mol_type = other DNA
ctgagatgaacaggggctcga

SEQ ID NO: 665 - DNA, 21 bp, synthetic construct
  source 1..21: mol_type = other DNA
accgcgctcgttatcatgtgg

SEQ ID NO: 666 - DNA, 21 bp, synthetic construct
  source 1..21: mol_type = other DNA
acaaagagtgggtggccaagc

SEQ ID NO: 667 - DNA, 21 bp, synthetic construct
  source 1..21: mol_type = other DNA
tcaaagctttgcgggaggggg

SEQ ID NO: 668 - DNA, 21 bp, synthetic construct
  source 1..21: mol_type = other DNA
gtagtcccacttggaggctaa

SEQ ID NO: 669 - DNA, 21 bp, synthetic construct
  source 1..21: mol_type = other DNA
tccttgctctctgcagaaatg

SEQ ID NO: 670 - DNA, 21 bp, synthetic construct
  source 1..21: mol_type = other DNA
gaacattgatgatggcacctc

SEQ ID NO: 671 - DNA, 21 bp, synthetic construct
  source 1..21: mol_type = other DNA
tccccaggtactctgtggata

SEQ ID NO: 672 - DNA, 21 bp, synthetic construct
  source 1..21: mol_type = other DNA
ccttctagatacaagacaggc

SEQ ID NO: 673 - DNA, 21 bp, synthetic construct
  source 1..21: mol_type = other DNA
cgtccggagtagcgtccagcc

SEQ ID NO: 674 - DNA, 21 bp, synthetic construct
  source 1..21: mol_type = other DNA
tctttgatctcttggcgatct

SEQ ID NO: 675 - DNA, 21 bp, synthetic construct
  source 1..21: mol_type = other DNA
acaaaagattttatctttgat

SEQ ID NO: 676 - DNA, 21 bp, synthetic construct
  source 1..21: mol_type = other DNA
gaggctttgtgttcatttcgc

SEQ ID NO: 677 - DNA, 21 bp, synthetic construct
  source 1..21: mol_type = other DNA
tgttcatttcgccctaggccc

SEQ ID NO: 678 - DNA, 21 bp, synthetic construct
  source 1..21: mol_type = other DNA
gccctaggccccttctcgatg

SEQ ID NO: 679 - DNA, 21 bp, synthetic construct
  source 1..21: mol_type = other DNA
caatgtcctttccccggagct

SEQ ID NO: 680 - DNA, 21 bp, synthetic construct
  source 1..21: mol_type = other DNA
ccaagcacctggttattgggt

SEQ ID NO: 681 - DNA, 21 bp, synthetic construct
  source 1..21: mol_type = other DNA
ttggaagtctccacatcttct

SEQ ID NO: 682 - DNA, 21 bp, synthetic construct
  source 1..21: mol_type = other DNA
gcctgggcggccgtagggccc

SEQ ID NO: 683 - DNA, 21 bp, synthetic construct
  source 1..21: mol_type = other DNA
aggcctcaagctccggggaaa

SEQ ID NO: 684 - DNA, 21 bp, synthetic construct
  source 1..21: mol_type = other DNA
gaaaatcaatgagaagccaca

SEQ ID NO: 685 - DNA, 21 bp, synthetic construct
  source 1..21: mol_type = other DNA
cctcacaccgactccaggggc

SEQ ID NO: 686 - DNA, 21 bp, synthetic construct
  source 1..21: mol_type = other DNA
taggctatcttagcggcacag

SEQ ID NO: 687 - DNA, 21 bp, synthetic construct
  source 1..21: mol_type = other DNA
taattttctaggctatcttag

SEQ ID NO: 688 - DNA, 21 bp, synthetic construct
  source 1..21: mol_type = other DNA
aaagaaaaatgcttaaatttc

SEQ ID NO: 689 - DNA, 21 bp, synthetic construct
  source 1..21: mol_type = other DNA
agaatgagcaagattcacttt

SEQ ID NO: 690 - DNA, 21 bp, synthetic construct
  source 1..21: mol_type = other DNA
taggtagaggccctgcttctt

SEQ ID NO: 691 - DNA, 21 bp, synthetic construct
  source 1..21: mol_type = other DNA
gatctaacaaccacaagagaa

SEQ ID NO: 692 - DNA, 21 bp, synthetic construct
  source 1..21: mol_type = other DNA
gcttttgttcattcataaact

SEQ ID NO: 693 - DNA, 21 bp, synthetic construct
  source 1..21: mol_type = other DNA
ttcattcataaactccaagtc

SEQ ID NO: 694 - DNA, 21 bp, synthetic construct
  source 1..21: mol_type = other DNA
cctcagagggaacatactgct

SEQ ID NO: 695 - DNA, 21 bp, synthetic construct
  source 1..21: mol_type = other DNA
tccatcttcaagaaaattcct

SEQ ID NO: 696 - DNA, 21 bp, synthetic construct
  source 1..21: mol_type = other DNA
cttagagatgattctctcaaa

SEQ ID NO: 697 - DNA, 21 bp, synthetic construct
  source 1..21: mol_type = other DNA
taggctcctgctccaaatgtg

SEQ ID NO: 698 - DNA, 21 bp, synthetic construct
  source 1..21: mol_type = other DNA
cgtcatcggcttgaagataaa

SEQ ID NO: 699 - DNA, 21 bp, synthetic construct
  source 1..21: mol_type = other DNA
tgaatgaacaaaagctaaaca

SEQ ID NO: 700 - DNA, 21 bp, synthetic construct
  source 1..21: mol_type = other DNA
cagaagctgagtatctatggt

SEQ ID NO: 701 - DNA, 21 bp, synthetic construct
  source 1..21: mol_type = other DNA
ttttgcagaagctgagtatct

SEQ ID NO: 702 - DNA, 21 bp, synthetic construct
  source 1..21: mol_type = other DNA
ttgtgcaactgttgctacagc

SEQ ID NO: 703 - DNA, 21 bp, synthetic construct
  source 1..21: mol_type = other DNA
gatttgttgtgcaactgttgc

SEQ ID NO: 704 - DNA, 21 bp, synthetic construct
  source 1..21: mol_type = other DNA
actacaactcttgtcctctcg

SEQ ID NO: 705 - DNA, 21 bp, synthetic construct
  source 1..21: mol_type = other DNA
cagtaactctgggtggatttt

SEQ ID NO: 706 - DNA, 21 bp, synthetic construct
  source 1..21: mol_type = other DNA
ttgaagatggagaaagtgatg

SEQ ID NO: 707 - DNA, 21 bp, synthetic construct
  source 1..21: mol_type = other DNA
agcagatctgcaaatgagaaa

SEQ ID NO: 708 - DNA, 21 bp, synthetic construct
  source 1..21: mol_type = other DNA
agagaatcatctctaagcaaa

SEQ ID NO: 709 - DNA, 21 bp, synthetic construct
  source 1..21: mol_type = other DNA
gagcaggagcctacaaatttg

SEQ ID NO: 710 - DNA, 21 bp, synthetic construct
  source 1..21: mol_type = other DNA
gtctaagccagaaatccagta

SEQ ID NO: 711 - DNA, 21 bp, synthetic construct
  source 1..21: mol_type = other DNA
attattattttagtctaagcc

SEQ ID NO: 712 - DNA, 21 bp, synthetic construct
  source 1..21: mol_type = other DNA
tcttcaagccgatgacggaaa

SEQ ID NO: 713 - DNA, 21 bp, synthetic construct
  source 1..21: mol_type = other DNA
tcttttccaggaatttgacaa

SEQ ID NO: 714 - DNA, 21 bp, synthetic construct
  source 1..21: mol_type = other DNA
caggaatttgacaagaagtac

SEQ ID NO: 715 - DNA, 21 bp, synthetic construct
  source 1..21: mol_type = other DNA
atgtgtcacataactaccgaa

SEQ ID NO: 716 - DNA, 21 bp, synthetic construct
  source 1..21: mol_type = other DNA
tttcttaggaacatcattcat

SEQ ID NO: 717 - DNA, 21 bp, synthetic construct
  source 1..21: mol_type = other DNA
ttaggaacatcattcatggca

SEQ ID NO: 718 - DNA, 21 bp, synthetic construct
  source 1..21: mol_type = other DNA
gctgatggcaacacctcatag

SEQ ID NO: 719 - DNA, 21 bp, synthetic construct
  source 1..21: mol_type = other DNA
tgttttctaggagttggcctg

SEQ ID NO: 720 - DNA, 21 bp, synthetic construct
  source 1..21: mol_type = other DNA
taggagttggcctgggccctg

SEQ ID NO: 721 - DNA, 21 bp, synthetic construct
  source 1..21: mol_type = other DNA
tattgctgtcaaccccaggta

SEQ ID NO: 722 - DNA, 21 bp, synthetic construct
  source 1..21: mol_type = other DNA
taacagcatccttcccactgc

SEQ ID NO: 723 - DNA, 21 bp, synthetic construct
  source 1..21: mol_type = other DNA
atgggcacggcaatgatcttt

SEQ ID NO: 724 - DNA, 21 bp, synthetic construct
  source 1..21: mol_type = other DNA
cctgcttcaccctcagtgcac

SEQ ID NO: 725 - DNA, 21 bp, synthetic construct
  source 1..21: mol_type = other DNA
ctgtgtcttataggtatcttg

SEQ ID NO: 726 - DNA, 21 bp, synthetic construct
  source 1..21: mol_type = other DNA
tcttccctggggaatgttttc

SEQ ID NO: 727 - DNA, 21 bp, synthetic construct
  source 1..21: mol_type = other DNA
gatccatttggcttttccagg

SEQ ID NO: 728 - DNA, 21 bp, synthetic construct
  source 1..21: mol_type = other DNA
ttaggcaaacctgtatgtggg

SEQ ID NO: 729 - DNA, 21 bp, synthetic construct
  source 1..21: mol_type = other DNA
atactcaactcattattgaaa

SEQ ID NO: 730 - DNA, 21 bp, synthetic construct
  source 1..21: mol_type = other DNA
aggcactgcattgatctcttc

SEQ ID NO: 731 - DNA, 21 bp, synthetic construct
  source 1..21: mol_type = other DNA
attactgtcttcagaaaactc

SEQ ID NO: 732 - DNA, 21 bp, synthetic construct
  source 1..21: mol_type = other DNA
tccatttctaggataagaaga

SEQ ID NO: 733 - DNA, 21 bp, synthetic construct
  source 1..21: mol_type = other DNA
taggataagaagaaagagaag

SEQ ID NO: 734 - DNA, 21 bp, synthetic construct
  source 1..21: mol_type = other DNA
atggctatgaggtgttgccat

SEQ ID NO: 735 - DNA, 21 bp, synthetic construct
  source 1..21: mol_type = other DNA
tgttcagtttcatggctatga

SEQ ID NO: 736 - DNA, 21 bp, synthetic construct
  source 1..21: mol_type = other DNA
ccagttcacacttacctccca

SEQ ID NO: 737 - DNA, 21 bp, synthetic construct
  source 1..21: mol_type = other DNA
aataatgagttgagtatcaaa

SEQ ID NO: 738 - DNA, 21 bp, synthetic construct
  source 1..21: mol_type = other DNA
tgaagacagtaatgaaatcta

SEQ ID NO: 739 - DNA, 21 bp, synthetic construct
  source 1..21: mol_type = other DNA
attcatggccaggatcatcat

SEQ ID NO: 740 - DNA, 21 bp, synthetic construct
  source 1..21: mol_type = other DNA
ggttgtaggctaactaacctt

SEQ ID NO: 741 - DNA, 21 bp, synthetic construct
  source 1..21: mol_type = other DNA
tttaggaaattgaagttggtg

SEQ ID NO: 742 - DNA, 21 bp, synthetic construct
  source 1..21: mol_type = other DNA
ggaaattgaagttggtggtgg

SEQ ID NO: 743 - DNA, 21 bp, synthetic construct
  source 1..21: mol_type = other DNA
ccttacagaggagaattctgc

SEQ ID NO: 744 - DNA, 21 bp, synthetic construct
  source 1..21: mol_type = other DNA
aactattcttttagccgtact

SEQ ID NO: 745 - DNA, 21 bp, synthetic construct
  source 1..21: mol_type = other DNA
gccgtactctgacagctgtgc

SEQ ID NO: 746 - DNA, 21 bp, synthetic construct
  source 1..21: mol_type = other DNA
ttttcttgtaggttgaaactt

SEQ ID NO: 747 - DNA, 21 bp, synthetic construct
  source 1..21: mol_type = other DNA
ttgtaggttgaaactttttct

SEQ ID NO: 748 - DNA, 21 bp, synthetic construct
  source 1..21: mol_type = other DNA
tgaaactactaaaatactcac

SEQ ID NO: 749 - DNA, 21 bp, synthetic construct
  source 1..21: mol_type = other DNA
cttcccagggcgtgatggtgg

SEQ ID NO: 750 - DNA, 21 bp, synthetic construct
  source 1..21: mol_type = other DNA
atttgtagtgatgatgatgat

SEQ ID NO: 751 - DNA, 21 bp, synthetic construct
  source 1..21: mol_type = other DNA
taattgcagtctatacgagat

SEQ ID NO: 752 - DNA, 21 bp, synthetic construct
  source 1..21: mol_type = other DNA
gaaattcatttctttttcagg

SEQ ID NO: 753 - DNA, 21 bp, synthetic construct
  source 1..21: mol_type = other DNA
tttttcagggacaagaatcct

SEQ ID NO: 754 - DNA, 21 bp, synthetic construct
  source 1..21: mol_type = other DNA
agggacaagaatccttcaaga

SEQ ID NO: 755 - DNA, 21 bp, synthetic construct
  source 1..21: mol_type = other DNA
tcttaatagggtggttctctt

SEQ ID NO: 756 - DNA, 21 bp, synthetic construct
  source 1..21: mol_type = other DNA
caggctattcaagatctctgg

SEQ ID NO: 757 - DNA, 21 bp, synthetic construct
  source 1..21: mol_type = other DNA
taaaatcatacttactcttca

SEQ ID NO: 758 - DNA, 21 bp, synthetic construct
  source 1..21: mol_type = other DNA
ctcactttttctatacttgct

SEQ ID NO: 759 - DNA, 21 bp, synthetic construct
  source 1..21: mol_type = other DNA
tttttcttggtacgctgcttc

SEQ ID NO: 760 - DNA, 21 bp, synthetic construct
  source 1..21: mol_type = other DNA
gggcccaggcggcgaggcact

SEQ ID NO: 761 - DNA, 21 bp, synthetic construct
  source 1..21: mol_type = other DNA
ggaggctaaggagaagcgcca

SEQ ID NO: 762 - DNA, 21 bp, synthetic construct
  source 1..21: mol_type = other DNA
tttaggaggctaaggagaagc

SEQ ID NO: 763 - DNA, 21 bp, synthetic construct
  source 1..21: mol_type = other DNA
ttttgtttaggaggctaagga

SEQ ID NO: 764 - DNA, 21 bp, synthetic construct
  source 1..21: mol_type = other DNA
ggtaagaaacctaggaccaaa

SEQ ID NO: 765 - DNA, 21 bp, synthetic construct
  source 1..21: mol_type = other DNA
aatttttaggtaagaaaccta

SEQ ID NO: 766 - DNA, 21 bp, synthetic construct
  source 1..21: mol_type = other DNA
ttctaaggagagaaggatatt

SEQ ID NO: 767 - DNA, 21 bp, synthetic construct
  source 1..21: mol_type = other DNA
cttaaaggaaccattaaagag

SEQ ID NO: 768 - DNA, 21 bp, synthetic construct
  source 1..21: mol_type = other DNA
tttacttaaaggaaccattaa

SEQ ID NO: 769 - DNA, 21 bp, synthetic construct
  source 1..21: mol_type = other DNA
ctcttctgcagttaaacacag

SEQ ID NO: 770 - DNA, 21 bp, synthetic construct
  source 1..21: mol_type = other DNA
ctgtttcctcttctgcagtta

SEQ ID NO: 771 - DNA, 21 bp, synthetic construct
  source 1..21: mol_type = other DNA
tagtctccaaaaaaagttggt

SEQ ID NO: 772 - DNA, 21 bp, synthetic construct
  source 1..21: mol_type = other DNA
tttctagtctccaaaaaaagt

SEQ ID NO: 773 - DNA, 21 bp, synthetic construct
  source 1..21: mol_type = other DNA
ccccagtatacctgaggtgca

SEQ ID NO: 774 - DNA, 21 bp, synthetic construct
  source 1..21: mol_type = other DNA
aacctgttacccacagaccct

SEQ ID NO: 775 - DNA, 21 bp, synthetic construct
  source 1..21: mol_type = other DNA
gcattgacacatgtcgcagca

SEQ ID NO: 776 - DNA, 21 bp, synthetic construct
  source 1..21: mol_type = other DNA
aggaattcaagtacttgtgga

SEQ ID NO: 777 - DNA, 21 bp, synthetic construct
  source 1..21: mol_type = other DNA
cagtagtgaactcccaggtgc

SEQ ID NO: 778 - DNA, 21 bp, synthetic construct
  source 1..21: mol_type = other DNA
atgttgttccacaagtacttg

SEQ ID NO: 779 - DNA, 21 bp, synthetic construct
  source 1..21: mol_type = other DNA
tacacacctgccaccttttga

SEQ ID NO: 780 - DNA, 21 bp, synthetic construct
  source 1..21: mol_type = other DNA
agaggtttctacacacctgcc

SEQ ID NO: 781 - DNA, 21 bp, synthetic construct
  source 1..21: mol_type = other DNA
atctgagtagcgtcggatgat

SEQ ID NO: 782 - DNA, 21 bp, synthetic construct
  source 1..21: mol_type = other DNA
tcaagagatttgaaggcacct

SEQ ID NO: 783 - DNA, 21 bp, synthetic construct
  source 1..21: mol_type = other DNA
tccagtgccatctttgtcaag

SEQ ID NO: 784 - DNA, 21 bp, synthetic construct
  source 1..21: mol_type = other DNA
cagggtggctttgtccactat

SEQ ID NO: 785 - DNA, 21 bp, synthetic construct
  source 1..21: mol_type = other DNA
tttattagcttacctttctgt

SEQ ID NO: 786 - DNA, 21 bp, synthetic construct
  source 1..21: mol_type = other DNA
ttagcttacctttctgttcct

SEQ ID NO: 787 - DNA, 21 bp, synthetic construct
  source 1..21: mol_type = other DNA
agtgaatcatctacagcctct

SEQ ID NO: 788 - DNA, 21 bp, synthetic construct
  source 1..21: mol_type = other DNA
tttttcagtgaatcatctaca

SEQ ID NO: 789 - DNA, 21 bp, synthetic construct
  source 1..21: mol_type = other DNA
cccttttttctttttcagtga

SEQ ID NO: 790 - DNA, 21 bp, synthetic construct
  source 1..21: mol_type = other DNA
aggtgtaatcctgagagattc

SEQ ID NO: 791 - DNA, 21 bp, synthetic construct
  source 1..21: mol_type = other DNA
tattccataacagtggttgaa

SEQ ID NO: 792 - DNA, 21 bp, synthetic construct
  source 1..21: mol_type = other DNA
tccacagctccgctagcaatc

SEQ ID NO: 793 - DNA, 21 bp, synthetic construct
  source 1..21: mol_type = other DNA
tgacccttcttctctttctag

SEQ ID NO: 794 - DNA, 21 bp, synthetic construct
  source 1..21: mol_type = other DNA
taggttgacaaggtcacaggc

SEQ ID NO: 795 - DNA, 21 bp, synthetic construct
  source 1..21: mol_type = other DNA
ttaagggtgagtcagatgatt

SEQ ID NO: 796 - DNA, 21 bp, synthetic construct
  source 1..21: mol_type = other DNA
ccctggttctaggaacttttg

SEQ ID NO: 797 - DNA, 21 bp, synthetic construct
  source 1..21: mol_type = other DNA
agacgatgccatcggccttgg

SEQ ID NO: 798 - DNA, 21 bp, synthetic construct
  source 1..21: mol_type = other DNA
attttctttccttaggcggta

SEQ ID NO: 799 - DNA, 21 bp, synthetic construct
  source 1..21: mol_type = other DNA
tttccttaggcggtaaccagc

SEQ ID NO: 800 - DNA, 21 bp, synthetic construct
  source 1..21: mol_type = other DNA
cttaggcggtaaccagcgtga

SEQ ID NO: 801 - DNA, 21 bp, synthetic construct
  source 1..21: mol_type = other DNA
tgctgccgcccgcaagcagag

SEQ ID NO: 802 - DNA, 21 bp, synthetic construct
  source 1..21: mol_type = other DNA
atattcttctggcgggcgagc

SEQ ID NO: 803 - DNA, 21 bp, synthetic construct
  source 1..21: mol_type = other DNA
ccttaaccgagtcgctctgct

SEQ ID NO: 804 - DNA, 21 bp, synthetic construct
  source 1..21: mol_type = other DNA
cctcccctccctggggctacc

SEQ ID NO: 805 - DNA, 21 bp, synthetic construct
  source 1..21: mol_type = other DNA
tttcccctcctgccttttagg

SEQ ID NO: 806 - DNA, 21 bp, synthetic construct
  source 1..21: mol_type = other DNA
ccctcctgccttttagggaag

SEQ ID NO: 807 - DNA, 21 bp, synthetic construct
  source 1..21: mol_type = other DNA
gggaagacaaaggcgctttgg

SEQ ID NO: 808 - DNA, 21 bp, synthetic construct
  source 1..21: mol_type = other DNA
tcttttcagatccgccgtcac

SEQ ID NO: 809 - DNA, 21 bp, synthetic construct
  source 1..21: mol_type = other DNA
agatccgccgtcactggggtg

SEQ ID NO: 810 - DNA, 21 bp, synthetic construct
  source 1..21: mol_type = other DNA
gggccaggctgtgtacttacg

SEQ ID NO: 811 - DNA, 21 bp, synthetic construct
  source 1..21: mol_type = other DNA
gtgtaaagctgcctcttacct

SEQ ID NO: 812 - DNA, 21 bp, synthetic construct
  source 1..21: mol_type = other DNA
taaattacctccaccatatgg

SEQ ID NO: 813 - DNA, 21 bp, synthetic construct
  source 1..21: mol_type = other DNA
cactcttcattggaccgtagt

SEQ ID NO: 814 - DNA, 21 bp, synthetic construct
  source 1..21: mol_type = other DNA
caaaatcattgtaatttccac

SEQ ID NO: 815 - DNA, 21 bp, synthetic construct
  source 1..21: mol_type = other DNA
ttacctcctccatagttgtca

SEQ ID NO: 816 - DNA, 21 bp, synthetic construct
  source 1..21: mol_type = other DNA
caccgccaccacgtgaatccc

SEQ ID NO: 817 - DNA, 21 bp, synthetic construct
  source 1..21: mol_type = other DNA
gtggtagcaggaacatggggg

SEQ ID NO: 818 - DNA, 21 bp, synthetic construct
  source 1..21: mol_type = other DNA
gaaattataaccagcaacctt

SEQ ID NO: 819 - DNA, 21 bp, synthetic construct
  source 1..21: mol_type = other DNA
ataggaaattatggaagtgga

SEQ ID NO: 820 - DNA, 21 bp, synthetic construct
  source 1..21: mol_type = other DNA
gaggtagccccggttatggag

SEQ ID NO: 821 - DNA, 21 bp, synthetic construct
  source 1..21: mol_type = other DNA
taataggtggcaattttggag

SEQ ID NO: 822 - DNA, 21 bp, synthetic construct
  source 1..21: mol_type = other DNA
gggatggctataatgggtatg

SEQ ID NO: 823 - DNA, 21 bp, synthetic construct
  source 1..21: mol_type = other DNA
gcccctaacagatggatatgg

SEQ ID NO: 824 - DNA, 21 bp, synthetic construct
  source 1..21: mol_type = other DNA
ggaccaggaccaggaagtaac

SEQ ID NO: 825 - DNA, 21 bp, synthetic construct
  source 1..21: mol_type = other DNA
gggattcacgtggtggcggtg

SEQ ID NO: 826 - DNA, 21 bp, synthetic construct
  source 1..21: mol_type = other DNA
gctttggggattcacgtggtg

SEQ ID NO: 827 - DNA, 21 bp, synthetic construct
  source 1..21: mol_type = other DNA
ttgtaggcaactttggctttg

SEQ ID NO: 828 - DNA, 21 bp, synthetic construct
  source 1..21: mol_type = other DNA
tctagacaagaaatgcaggaa

SEQ ID NO: 829 - DNA, 21 bp, synthetic construct
  source 1..21: mol_type = other DNA
tctaacagaaaaagcggatgg

SEQ ID NO: 830 - DNA, 21 bp, synthetic construct
  source 1..21: mol_type = other DNA
gcatagctcaccttgtcgtag

SEQ ID NO: 831 - DNA, 21 bp, synthetic construct
  source 1..21: mol_type = other DNA
agcaggaggcagttgcaggac

SEQ ID NO: 832 - DNA, 21 bp, synthetic construct
  source 1..21: mol_type = other DNA
tccttcccaagaattgaagag

SEQ ID NO: 833 - DNA, 21 bp, synthetic construct
  source 1..21: mol_type = other DNA
cctttctccttcccaagaatt

SEQ ID NO: 834 - DNA, 21 bp, synthetic construct
  source 1..21: mol_type = other DNA
tcctagatcaagactggtgcc

SEQ ID NO: 835 - DNA, 21 bp, synthetic construct
  source 1..21: mol_type = other DNA
ttttctcctagatcaagactg

SEQ ID NO: 836 - DNA, 21 bp, synthetic construct
  source 1..21: mol_type = other DNA
cttagtggtgtctatcgaaga

SEQ ID NO: 837 - DNA, 21 bp, synthetic construct
  source 1..21: mol_type = other DNA
ctatatgttgacagggtggtg

SEQ ID NO: 838 - DNA, 21 bp, synthetic construct
  source 1..21: mol_type = other DNA
aaggttggatggcaagcatgt

SEQ ID NO: 839 - DNA, 21 bp, synthetic construct
  source 1..21: mol_type = other DNA
cctgtgaggtggccgccggca

SEQ ID NO: 840 - DNA, 21 bp, synthetic construct
  source 1..21: mol_type = other DNA
accacctcagtgctcaagaac

SEQ ID NO: 841 - DNA, 21 bp, synthetic construct
  source 1..21: mol_type = other DNA
tgtccctcgggcagcaacatc

SEQ ID NO: 842 - DNA, 21 bp, synthetic construct
  source 1..21: mol_type = other DNA
ttgacaatgcgcccctcaggc

SEQ ID NO: 843 - DNA, 21 bp, synthetic construct
  source 1..21: mol_type = other DNA
tagccgagtcgtccggaaatc

SEQ ID NO: 844 - DNA, 21 bp, synthetic construct
  source 1..21: mol_type = other DNA
ttctgtgggttgatctgtatt

SEQ ID NO: 845 - DNA, 21 bp, synthetic construct
  source 1..21: mol_type = other DNA
ccagcaccatcctgcaccttg

SEQ ID NO: 846 - DNA, 21 bp, synthetic construct
  source 1..21: mol_type = other DNA
tctttgccagcaccatcctgc

SEQ ID NO: 847 - DNA, 21 bp, synthetic construct
  source 1..21: mol_type = other DNA
ctgattttctctttgccagca

SEQ ID NO: 848 - DNA, 21 bp, synthetic construct
  source 1..21: mol_type = other DNA
caaggcatctccccagagcga

SEQ ID NO: 849 - DNA, 21 bp, synthetic construct
  source 1..21: mol_type = other DNA
cctgagaatacagatcaaccc

SEQ ID NO: 850 - DNA, 21 bp, synthetic construct
  source 1..21: mol_type = other DNA
cttcttgtgcagtttgcctga

SEQ ID NO: 851 - DNA, 21 bp, synthetic construct
  source 1..21: mol_type = other DNA
tgttttgcttcttgtgcagtt

SEQ ID NO: 852 - DNA, 21 bp, synthetic construct
  source 1..21: mol_type = other DNA
tctcgggcttcatctcttgtg

SEQ ID NO: 853 - DNA, 21 bp, synthetic construct
  source 1..21: mol_type = other DNA
gcggttcttagaagagtactt

SEQ ID NO: 854 - DNA, 21 bp, synthetic construct
  source 1..21: mol_type = other DNA
tgaagaccctcactggcaaaa

SEQ ID NO: 855 - DNA, 21 bp, synthetic construct
  source 1..21: mol_type = other DNA
ccagtgagggtcttcacaaag

SEQ ID NO: 856 - DNA, 21 bp, synthetic construct
  source 1..21: mol_type = other DNA
tgggcaagctggcggagagaa

SEQ ID NO: 857 - DNA, 21 bp, synthetic construct
  source 1..21: mol_type = other DNA
accttcttcttgggacgcagg

SEQ ID NO: 858 - DNA, 21 bp, synthetic construct
  source 1..21: mol_type = other DNA
taggtgaaaaggtttactttt

SEQ ID NO: 859 - DNA, 21 bp, synthetic construct
  source 1..21: mol_type = other DNA
tgatttaaaaagcatacctgg

SEQ ID NO: 860 - DNA, 21 bp, synthetic construct
  source 1..21: mol_type = other DNA
aaaagcatacctggatcaatg

SEQ ID NO: 861 - DNA, 21 bp, synthetic construct
  source 1..21: mol_type = other DNA
ggtgactctgacatcattaga

SEQ ID NO: 862 - DNA, 21 bp, synthetic construct
  source 1..21: mol_type = other DNA
ttttttaggtgactctgacat

SEQ ID NO: 863 - DNA, 21 bp, synthetic construct
  source 1..21: mol_type = other DNA
tttttattttttaggtgactc

SEQ ID NO: 864 - DNA, 21 bp, synthetic construct
  source 1..21: mol_type = other DNA
gttcccaaaggaaatctgaaa

SEQ ID NO: 865 - DNA, 21 bp, synthetic construct
  source 1..21: mol_type = other DNA
cccattttggttcccaaagga

SEQ ID NO: 866 - DNA, 21 bp, synthetic construct
  source 1..21: mol_type = other DNA
tagaaaaagtcgctggagtcg

SEQ ID NO: 867 - DNA, 21 bp, synthetic construct
  source 1..21: mol_type = other DNA
ctttgtagaaaaagtcgctgg

SEQ ID NO: 868 - DNA, 21 bp, synthetic construct
  source 1..21: mol_type = other DNA
atgtttgctttgtagaaaaag

SEQ ID NO: 869 - DNA, 21 bp, synthetic construct
  source 1..21: mol_type = other DNA
cgcctgccgcccccggatggg

SEQ ID NO: 870 - DNA, 21 bp, synthetic construct
  source 1..21: mol_type = other DNA
tcccaccgctttccgagcccg

SEQ ID NO: 871 - DNA, 21 bp, synthetic construct
  source 1..21: mol_type = other DNA
cgagcccgcttgcacctcggc

SEQ ID NO: 872 - DNA, 21 bp, synthetic construct
  source 1..21: mol_type = other DNA
tggcgtcgctcctgtgctgtg

SEQ ID NO: 873 - DNA, 21 bp, synthetic construct
  source 1..21: mol_type = other DNA
tgttgcagcctcggaaaattg

SEQ ID NO: 874 - DNA, 21 bp, synthetic construct
  source 1..21: mol_type = other DNA
tctctttccctctaggtttgg

SEQ ID NO: 875 - DNA, 21 bp, synthetic construct
  source 1..21: mol_type = other DNA
cctctaggtttggcagtgaag

SEQ ID NO: 876 - DNA, 21 bp, synthetic construct
  source 1..21: mol_type = other DNA
gtcgggctgtgagcaggaagt

SEQ ID NO: 877 - DNA, 21 bp, synthetic construct
  source 1..21: mol_type = other DNA
ttctttctattgtcttccagg

SEQ ID NO: 878 - DNA, 21 bp, synthetic construct
  source 1..21: mol_type = other DNA
tattgtcttccaggcaccatt

SEQ ID NO: 879 - DNA, 21 bp, synthetic construct
  source 1..21: mol_type = other DNA
gctaaagttctttcagtcatc

SEQ ID NO: 880 - DNA, 21 bp, synthetic construct
  source 1..21: mol_type = other DNA
cccatcagcaggactagcgct

SEQ ID NO: 881 - DNA, 21 bp, synthetic construct
  source 1..21: mol_type = other DNA
ctcctcctccagcgctagtcc

SEQ ID NO: 882 - DNA, 21 bp, synthetic construct
  source 1..21: mol_type = other DNA
tctttcctcctcctccagcgc

SEQ ID NO: 883 - DNA, 21 bp, synthetic construct
  source 1..21: mol_type = other DNA
gcatggatcttcgtaccaaga

SEQ ID NO: 884 - DNA, 21 bp, synthetic construct
  source 1..21: mol_type = other DNA
tcctcataatctgtagactga

SEQ ID NO: 885 - DNA, 21 bp, synthetic construct
  source 1..21: mol_type = other DNA
tctttcctatcctttcaggct

SEQ ID NO: 886 - DNA, 21 bp, synthetic construct
  source 1..21: mol_type = other DNA
ctatcctttcaggctattgag

SEQ ID NO: 887 - DNA, 21 bp, synthetic construct
  source 1..21: mol_type = other DNA
aggctattgagggcacctaca

SEQ ID NO: 888 - DNA, 21 bp, synthetic construct
  source 1..21: mol_type = other DNA
ttctgaggttccccgcacctc

SEQ ID NO: 889 - DNA, 23 bp, synthetic construct
  source 1..23: mol_type = other DNA
cccagctctcataccatgagtcc

SEQ ID NO: 890 - DNA, 23 bp, synthetic construct
  source 1..23: mol_type = other DNA
tatccacagtgaatcttggttgt

SEQ ID NO: 891 - DNA, 23 bp, synthetic construct
  source 1..23: mol_type = other DNA
cacttcgtgcccgaaacgccgaa

SEQ ID NO: 892 - DNA, 23 bp, synthetic construct
  source 1..23: mol_type = other DNA
tctctgaccattgtagcggtttg

SEQ ID NO: 893 - DNA, 23 bp, synthetic construct
  source 1..23: mol_type = other DNA
tagcggtttgctgcggtaatcat

SEQ ID NO: 894 - DNA, 23 bp, synthetic construct
  source 1..23: mol_type = other DNA
tcagttctgggaaaatggtgtgc

SEQ ID NO: 895 - DNA, 23 bp, synthetic construct
  source 1..23: mol_type = other DNA
agaatatggtggggagctgtgat

SEQ ID NO: 896 - DNA, 23 bp, synthetic construct
  source 1..23: mol_type = other DNA
tccttctagttatgagccagagt

SEQ ID NO: 897 - DNA, 23 bp, synthetic construct
  source 1..23: mol_type = other DNA
cctggtttaatctacagaatgat

SEQ ID NO: 898 - DNA, 23 bp, synthetic construct
  source 1..23: mol_type = other DNA
ttctccttatttttgtttctgga

SEQ ID NO: 899 - DNA, 23 bp, synthetic construct
  source 1..23: mol_type = other DNA
ttgtttctggaaaagttgtatta

SEQ ID NO: 900 - DNA, 23 bp, synthetic construct
  source 1..23: mol_type = other DNA
atgaagcatttgaaaacatctac

SEQ ID NO: 901 - DNA, 23 bp, synthetic construct
  source 1..23: mol_type = other DNA
taaagggattcaggaagacgacg

SEQ ID NO: 902 - DNA, 23 bp, synthetic construct
  source 1..23: mol_type = other DNA
ggcgtttcgggcacgaagtgcaa

SEQ ID NO: 903 - DNA, 23 bp, synthetic construct
  source 1..23: mol_type = other DNA
tattcggcgtttcgggcacgaag

SEQ ID NO: 904 - DNA, 23 bp, synthetic construct
  source 1..23: mol_type = other DNA
aaatagatctaaccttgggatta

SEQ ID NO: 905 - DNA, 23 bp, synthetic construct
  source 1..23: mol_type = other DNA
tcccagaactgaaaatcagtgcc

SEQ ID NO: 906 - DNA, 23 bp, synthetic construct
  source 1..23: mol_type = other DNA
cttacggctacctcttggctcct

SEQ ID NO: 907 - DNA, 23 bp, synthetic construct
  source 1..23: mol_type = other DNA
tcttgctgccagtctggactgtt

SEQ ID NO: 908 - DNA, 23 bp, synthetic construct
  source 1..23: mol_type = other DNA
tgaatcttgaagtccaagaactt

SEQ ID NO: 909 - DNA, 23 bp, synthetic construct
  source 1..23: mol_type = other DNA
ttggtgggtgagcacaaggcctt

SEQ ID NO: 910 - DNA, 23 bp, synthetic construct
  source 1..23: mol_type = other DNA
cagacttacctactaaattgttg

SEQ ID NO: 911 - DNA, 23 bp, synthetic construct
  source 1..23: mol_type = other DNA
aaccaggaaataactctggctca

SEQ ID NO: 912 - DNA, 23 bp, synthetic construct
  source 1..23: mol_type = other DNA
tgtagattaaaccaggaaataac

SEQ ID NO: 913 - DNA, 23 bp, synthetic construct
  source 1..23: mol_type = other DNA
tgggtttgatcattctgtagatt

SEQ ID NO: 914 - DNA, 23 bp, synthetic construct
  source 1..23: mol_type = other DNA
ctgctctgactttagcacctaag

SEQ ID NO: 915 - DNA, 23 bp, synthetic construct
  source 1..23: mol_type = other DNA
cgtcgtcttcctgaatcccttta

SEQ ID NO: 916 - DNA, 23 bp, synthetic construct
  source 1..23: mol_type = other DNA
tagtgagtggcggccctgggact

SEQ ID NO: 917 - DNA, 23 bp, synthetic construct
  source 1..23: mol_type = other DNA
ccagagtgcatgagctcggagct

SEQ ID NO: 918 - DNA, 23 bp, synthetic construct
  source 1..23: mol_type = other DNA
tatctacaacctggacgagagtg

SEQ ID NO: 919 - DNA, 23 bp, synthetic construct
  source 1..23: mol_type = other DNA
cctggacttctgcactgccaggg

SEQ ID NO: 920 - DNA, 23 bp, synthetic construct
  source 1..23: mol_type = other DNA
ctgacagctctttggggagttcc

SEQ ID NO: 921 - DNA, 23 bp, synthetic construct
  source 1..23: mol_type = other DNA
agctggagaagcccaagcccatc

SEQ ID NO: 922 - DNA, 23 bp, synthetic construct
  source 1..23: mol_type = other DNA
tcaccccactgctgcaccagatt

SEQ ID NO: 923 - DNA, 23 bp, synthetic construct
  source 1..23: mol_type = other DNA
atgaagataaattgatagcacaa

SEQ ID NO: 924 - DNA, 23 bp, synthetic construct
  source 1..23: mol_type = other DNA
atagcacaaaatctagaacttaa

SEQ ID NO: 925 - DNA, 23 bp, synthetic construct
  source 1..23: mol_type = other DNA
gtttgactaagcttaattgcttt

SEQ ID NO: 926 - DNA, 23 bp, synthetic construct
  source 1..23: mol_type = other DNA
ctttctggaacaggatctgaaac

SEQ ID NO: 927 - DNA, 23 bp, synthetic construct
  source 1..23: mol_type = other DNA
atacccatcaacactggtaagaa

SEQ ID NO: 928 - DNA, 23 bp, synthetic construct
  source 1..23: mol_type = other DNA
ttcatcaattggcggggttccat

SEQ ID NO: 929 - DNA, 23 bp, synthetic construct
  source 1..23: mol_type = other DNA
gcggggttccatttttccaggta

SEQ ID NO: 930 - DNA, 23 bp, synthetic construct
  source 1..23: mol_type = other DNA
tcccgccttaaatccacagcata

SEQ ID NO: 931 - DNA, 23 bp, synthetic construct
  source 1..23: mol_type = other DNA
acacactggagaggtctaaagtg

SEQ ID NO: 932 - DNA, 23 bp, synthetic construct
  source 1..23: mol_type = other DNA
cctctgcgagcccagatcaacct

SEQ ID NO: 933 - DNA, 23 bp, synthetic construct
  source 1..23: mol_type = other DNA
agttctagattttgtgctatcaa

SEQ ID NO: 934 - DNA, 23 bp, synthetic construct
  source 1..23: mol_type = other DNA
ttatggtttcattaagttctaga

SEQ ID NO: 935 - DNA, 23 bp, synthetic construct
  source 1..23: mol_type = other DNA
agcttagtcaaaccaatttttat

SEQ ID NO: 936 - DNA, 23 bp, synthetic construct
  source 1..23: mol_type = other DNA
ctcttttaaagtacctgttggga

SEQ ID NO: 937 - DNA, 23 bp, synthetic construct
  source 1..23: mol_type = other DNA
tatttctcttttaaagtacctgt

SEQ ID NO: 938 - DNA, 23 bp, synthetic construct
  source 1..23: mol_type = other DNA
acagctcaggctgtttccttttc

SEQ ID NO: 939 - DNA, 23 bp, synthetic construct
  source 1..23: mol_type = other DNA
tctcttctttgttgttttctgaa

SEQ ID NO: 940 - DNA, 23 bp, synthetic construct
  source 1..23: mol_type = other DNA
accggaattgtctcttctttgtt

SEQ ID NO: 941 - DNA, 23 bp, synthetic construct
  source 1..23: mol_type = other DNA
atgaacaatccacaccagcatct

SEQ ID NO: 942 - DNA, 23 bp, synthetic construct
  source 1..23: mol_type = other DNA
aaggttgatctgggctcgcagag

SEQ ID NO: 943 - DNA, 23 bp, synthetic construct
  source 1..23: mol_type = other DNA
ccaacccccaagtgaattaaagg

SEQ ID NO: 944 - DNA, 21 bp, synthetic construct
  source 1..21: mol_type = other DNA
tcttctaggtatgacaacgaa

SEQ ID NO: 945 - DNA, 21 bp, synthetic construct
  source 1..21: mol_type = other DNA
ccagctctcataccatgagtc

SEQ ID NO: 946 - DNA, 21 bp, synthetic construct
  source 1..21: mol_type = other DNA
tgcccgaaacgccgaatataa

SEQ ID NO: 947 - DNA, 21 bp, synthetic construct
  source 1..21: mol_type = other DNA
ctctgaccattgtagcggttt

SEQ ID NO: 948 - DNA, 21 bp, synthetic construct
  source 1..21: mol_type = other DNA
gttctgggaaaatggtgtgca

SEQ ID NO: 949 - DNA, 21 bp, synthetic construct
  source 1..21: mol_type = other DNA
gggaaaatggtgtgcacagga

SEQ ID NO: 950 - DNA, 21 bp, synthetic construct
  source 1..21: mol_type = other DNA
tttccctagtgaagaacagtc

SEQ ID NO: 951 - DNA, 21 bp, synthetic construct
  source 1..21: mol_type = other DNA
ctagtgaagaacagtccagac

SEQ ID NO: 952 - DNA, 21 bp, synthetic construct
  source 1..21: mol_type = other DNA
agctaagttcttggacttcaa

SEQ ID NO: 953 - DNA, 21 bp, synthetic construct
  source 1..21: mol_type = other DNA
tggacttcaagattcagaata

SEQ ID NO: 954 - DNA, 21 bp, synthetic construct
  source 1..21: mol_type = other DNA
agattcagaatatggtgggga

SEQ ID NO: 955 - DNA, 21 bp, synthetic construct
  source 1..21: mol_type = other DNA
gaatatggtggggagctgtga

SEQ ID NO: 956 - DNA, 21 bp, synthetic construct
  source 1..21: mol_type = other DNA
tataaggttagaaggccttgt

SEQ ID NO: 957 - DNA, 21 bp, synthetic construct
  source 1..21: mol_type = other DNA
ttctagttatgagccagagtt

SEQ ID NO: 958 - DNA, 21 bp, synthetic construct
  source 1..21: mol_type = other DNA
agttatgagccagagttattt

SEQ ID NO: 959 - DNA, 21 bp, synthetic construct
  source 1..21: mol_type = other DNA
tggtttaatctacagaatgat

SEQ ID NO: 960 - DNA, 21 bp, synthetic construct
  source 1..21: mol_type = other DNA
ccttatttttgtttctggaaa

SEQ ID NO: 961 - DNA, 21 bp, synthetic construct
  source 1..21: mol_type = other DNA
ggaaaagttgtattaacaggt

SEQ ID NO: 962 - DNA, 21 bp, synthetic construct
  source 1..21: mol_type = other DNA
taggtgctaaagtcagagcag

SEQ ID NO: 963 - DNA, 21 bp, synthetic construct
  source 1..21: mol_type = other DNA
aaagggattcaggaagacgac

SEQ ID NO: 964 - DNA, 21 bp, synthetic construct
  source 1..21: mol_type = other DNA
ggcacgaagtgcaatggtctt

SEQ ID NO: 965 - DNA, 21 bp, synthetic construct
  source 1..21: mol_type = other DNA
gcgtttcgggcacgaagtgca

SEQ ID NO: 966 - DNA, 21 bp, synthetic construct
  source 1..21: mol_type = other DNA
tggctctcttatcctcatgat

SEQ ID NO: 967 - DNA, 21 bp, synthetic construct
  source 1..21: mol_type = other DNA
cagaactgaaaatcagtgccg

SEQ ID NO: 968 - DNA, 21 bp, synthetic construct
  source 1..21: mol_type = other DNA
tacggctacctcttggctcct

SEQ ID NO: 969 - DNA, 21 bp, synthetic construct
  source 1..21: mol_type = other DNA
tgctgccagtctggactgttc

SEQ ID NO: 970 - DNA, 21 bp, synthetic construct
  source 1..21: mol_type = other DNA
gtacaactctagcatattttc

SEQ ID NO: 971 - DNA, 21 bp, synthetic construct
  source 1..21: mol_type = other DNA
gaatcttgaagtccaagaact

SEQ ID NO: 972 - DNA, 21 bp, synthetic construct
  source 1..21: mol_type = other DNA
catcacagctccccaccatat

SEQ ID NO: 973 - DNA, 21 bp, synthetic construct
  source 1..21: mol_type = other DNA
aaccttataggaaacttcaca

SEQ ID NO: 974 - DNA, 21 bp, synthetic construct
  source 1..21: mol_type = other DNA
gacttacctactaaattgttg

SEQ ID NO: 975 - DNA, 21 bp, synthetic construct
  source 1..21: mol_type = other DNA
gtagattaaaccaggaaataa

SEQ ID NO: 976 - DNA, 21 bp, synthetic construct
  source 1..21: mol_type = other DNA
gggtttgatcattctgtagat

SEQ ID NO: 977 - DNA, 21 bp, synthetic construct
  source 1..21: mol_type = other DNA
agaaacaaaaataaggagaac

SEQ ID NO: 978 - DNA, 21 bp, synthetic construct
  source 1..21: mol_type = other DNA
tgttacaacttacctgttaat

SEQ ID NO: 979 - DNA, 21 bp, synthetic construct
  source 1..21: mol_type = other DNA
gctctgactttagcacctaag

SEQ ID NO: 980 - DNA, 21 bp, synthetic construct
  source 1..21: mol_type = other DNA
taaatttctgctctgacttta

SEQ ID NO: 981 - DNA, 21 bp, synthetic construct
  source 1..21: mol_type = other DNA
aatgcttcataaatttctgct

SEQ ID NO: 982 - DNA, 21 bp, synthetic construct
  source 1..21: mol_type = other DNA
tgaatccctttagaatagggt

SEQ ID NO: 983 - DNA, 21 bp, synthetic construct
  source 1..21: mol_type = other DNA
ctcccactgggcccaacaaca

SEQ ID NO: 984 - DNA, 21 bp, synthetic construct
  source 1..21: mol_type = other DNA
gccctgctggacagcagcagc

SEQ ID NO: 985 - DNA, 21 bp, synthetic construct
  source 1..21: mol_type = other DNA
tccggacccaacccttctacc

SEQ ID NO: 986 - DNA, 21 bp, synthetic construct
  source 1..21: mol_type = other DNA
acctcctttgagcccatcaag

SEQ ID NO: 987 - DNA, 21 bp, synthetic construct
  source 1..21: mol_type = other DNA
tgtttttcagttttggaactc

SEQ ID NO: 988 - DNA, 21 bp, synthetic construct
  source 1..21: mol_type = other DNA
gttttggaactccccaaagag

SEQ ID NO: 989 - DNA, 21 bp, synthetic construct
  source 1..21: mol_type = other DNA
cagagtgcatgagctcggagc

SEQ ID NO: 990 - DNA, 21 bp, synthetic construct
  source 1..21: mol_type = other DNA
tctttctccacccccgggaga

SEQ ID NO: 991 - DNA, 21 bp, synthetic construct
  source 1..21: mol_type = other DNA
ccacccccgggagaccacgat

SEQ ID NO: 992 - DNA, 21 bp, synthetic construct
  source 1..21: mol_type = other DNA
gcactgccagggacagcagtg

SEQ ID NO: 993 - DNA, 21 bp, synthetic construct
  source 1..21: mol_type = other DNA
ctggacttctgcactgccagg

SEQ ID NO: 994 - DNA, 21 bp, synthetic construct
  source 1..21: mol_type = other DNA
gacagctctttggggagttcc

SEQ ID NO: 995 - DNA, 21 bp, synthetic construct
  source 1..21: mol_type = other DNA
gaggacatcaactcctccagc

SEQ ID NO: 996 - DNA, 21 bp, synthetic construct
  source 1..21: mol_type = other DNA
agggccacccaccttctgagg

SEQ ID NO: 997 - DNA, 21 bp, synthetic construct
  source 1..21: mol_type = other DNA
ctctcgtccaggttgtagata

SEQ ID NO: 998 - DNA, 21 bp, synthetic construct
  source 1..21: mol_type = other DNA
cccacttgtaggtgccctcat

SEQ ID NO: 999 - DNA, 21 bp, synthetic construct
  source 1..21: mol_type = other DNA
tcagctcgtctgcctccgtgg

SEQ ID NO: 1000 - DNA, 21 bp, synthetic construct
  source 1..21: mol_type = other DNA
tcacctgccataaatataggg

SEQ ID NO: 1001 - DNA, 21 bp, synthetic construct
  source 1..21: mol_type = other DNA
ccagctcaatctggtgcagca

SEQ ID NO: 1002 - DNA, 21 bp, synthetic construct
  source 1..21: mol_type = other DNA
ctgtagggcaccttgtatctg

SEQ ID NO: 1003 - DNA, 21 bp, synthetic construct
  source 1..21: mol_type = other DNA
tggtcatcatcttggtgtaca

SEQ ID NO: 1004 - DNA, 21 bp, synthetic construct
  source 1..21: mol_type = other DNA
gggccttgccgcagcgcagga

SEQ ID NO: 1005 - DNA, 21 bp, synthetic construct
  source 1..21: mol_type = other DNA
agtatgagggcacctacaagt

SEQ ID NO: 1006 - DNA, 21 bp, synthetic construct
  source 1..21: mol_type = other DNA
ccccactgctgcaccagattg

SEQ ID NO: 1007 - DNA, 21 bp, synthetic construct
  source 1..21: mol_type = other DNA
gcgggagccagatgcacttcg

SEQ ID NO: 1008 - DNA, 21 bp, synthetic construct
  source 1..21: mol_type = other DNA
accccgaggagtcggagctgg

SEQ ID NO: 1009 - DNA, 21 bp, synthetic construct
  source 1..21: mol_type = other DNA
tcaaccccgaggagtcggagc

SEQ ID NO: 1010 - DNA, 21 bp, synthetic construct
  source 1..21: mol_type = other DNA
accagcagtgcaagcgcaacg

SEQ ID NO: 1011 - DNA, 21 bp, synthetic construct
  source 1..21: mol_type = other DNA
atgatgtggccggcgacatct

SEQ ID NO: 1012 - DNA, 21 bp, synthetic construct
  source 1..21: mol_type = other DNA
tcctgcgctgcggcaaggccc

SEQ ID NO: 1013 - DNA, 21 bp, synthetic construct
  source 1..21: mol_type = other DNA
gccacgtaggggtgcccttca

SEQ ID NO: 1014 - DNA, 21 bp, synthetic construct
  source 1..21: mol_type = other DNA
ggaacaggatctgaaactgga

SEQ ID NO: 1015 - DNA, 21 bp, synthetic construct
  source 1..21: mol_type = other DNA
gaaaacaacaaagaagagaca

SEQ ID NO: 1016 - DNA, 21 bp, synthetic construct
  source 1..21: mol_type = other DNA
tcttttaggatgtggatgtag

SEQ ID NO: 1017 - DNA, 21 bp, synthetic construct
  source 1..21: mol_type = other DNA
tttaggatgtggatgtagaag

SEQ ID NO: 1018 - DNA, 21 bp, synthetic construct
  source 1..21: mol_type = other DNA
ggggcagtatactgaagaacc

SEQ ID NO: 1019 - DNA, 21 bp, synthetic construct
  source 1..21: mol_type = other DNA
tcaattggcggggttccattt

SEQ ID NO: 1020 - DNA, 21 bp, synthetic construct
  source 1..21: mol_type = other DNA
cgccttaaatccacagcataa

SEQ ID NO: 1021 - DNA, 21 bp, synthetic construct
  source 1..21: mol_type = other DNA
agattttgtgctatcaattta

SEQ ID NO: 1022 - DNA, 21 bp, synthetic construct
  source 1..21: mol_type = other DNA
ttaagttctagattttgtgct

SEQ ID NO: 1023 - DNA, 21 bp, synthetic construct
  source 1..21: mol_type = other DNA
agaaagcaattaagcttagtc

SEQ ID NO: 1024 - DNA, 21 bp, synthetic construct
  source 1..21: mol_type = other DNA
gatcctgttccagaaagcaat

SEQ ID NO: 1025 - DNA, 21 bp, synthetic construct
  source 1..21: mol_type = other DNA
cttttaaagtacctgttggga

SEQ ID NO: 1026 - DNA, 21 bp, synthetic construct
  source 1..21: mol_type = other DNA
atttctcttttaaagtacctg

SEQ ID NO: 1027 - DNA, 21 bp, synthetic construct
  source 1..21: mol_type = other DNA
tctgtggtgtcgtacctttaa

SEQ ID NO: 1028 - DNA, 21 bp, synthetic construct
  source 1..21: mol_type = other DNA
taccagtgttgatgggtataa

SEQ ID NO: 1029 - DNA, 21 bp, synthetic construct
  source 1..21: mol_type = other DNA
gttcttaccagtgttgatggg

SEQ ID NO: 1030 - DNA, 21 bp, synthetic construct
  source 1..21: mol_type = other DNA
cgtggttcagttcttaccagt

SEQ ID NO: 1031 - DNA, 21 bp, synthetic construct
  source 1..21: mol_type = other DNA
gctgatcaaggagatgttcac

SEQ ID NO: 1032 - DNA, 21 bp, synthetic construct
  source 1..21: mol_type = other DNA
ttttcagctgatcaaggagat

SEQ ID NO: 1033 - DNA, 21 bp, synthetic construct
  source 1..21: mol_type = other DNA
gaacagtttagcatcattaac

SEQ ID NO: 1034 - DNA, 21 bp, synthetic construct
  source 1..21: mol_type = other DNA
ttgttgttttctgaacagttt

SEQ ID NO: 1035 - DNA, 21 bp, synthetic construct
  source 1..21: mol_type = other DNA
gtatactgccccagaactgcc

SEQ ID NO: 1036 - DNA, 21 bp, synthetic construct
  source 1..21: mol_type = other DNA
tcagtatactgccccagaact

SEQ ID NO: 1037 - DNA, 21 bp, synthetic construct
  source 1..21: mol_type = other DNA
atgtgattttttatgctgtgg

SEQ ID NO: 1038 - DNA, 21 bp, synthetic construct
  source 1..21: mol_type = other DNA
ttgtcttttccatgtgatttt

SEQ ID NO: 1039 - DNA, 21 bp, synthetic construct
  source 1..21: mol_type = other DNA
actttagacctctccagtgtg

SEQ ID NO: 1040 - DNA, 21 bp, synthetic construct
  source 1..21: mol_type = other DNA
tccactttagacctctccagt

SEQ ID NO: 1041 - DNA, 21 bp, synthetic construct
  source 1..21: mol_type = other DNA
tgcagaccacagtccatgcca

SEQ ID NO: 1042 - DNA, 21 bp, synthetic construct
  source 1..21: mol_type = other DNA
gcagaccacagtccatgccat

SEQ ID NO: 1043 - DNA, 21 bp, synthetic construct
  source 1..21: mol_type = other DNA
cagaccacagtccatgccatc

SEQ ID NO: 1044 - DNA, 21 bp, synthetic construct
  source 1..21: mol_type = other DNA
tcatcttctaggtatgacaac

SEQ ID NO: 1045 - DNA, 21 bp, synthetic construct
  source 1..21: mol_type = other DNA
catcttctaggtatgacaacg

SEQ ID NO: 1046 - DNA, 21 bp, synthetic construct
  source 1..21: mol_type = other DNA
atcttctaggtatgacaacga

SEQ ID NO: 1047 - DNA, 21 bp, synthetic construct
  source 1..21: mol_type = other DNA
taggtatgacaacgaatttgg

SEQ ID NO: 1048 - DNA, 21 bp, synthetic construct
  source 1..21: mol_type = other DNA
cccagctctcataccatgagt

SEQ ID NO: 1049 - DNA, 21 bp, synthetic construct
  source 1..21: mol_type = other DNA
tatccacagtgaatcttggtt

SEQ ID NO: 1050 - DNA, 21 bp, synthetic construct
  source 1..21: mol_type = other DNA
gttgtaaacttgacctaaaga

SEQ ID NO: 1051 - DNA, 21 bp, synthetic construct
  source 1..21: mol_type = other DNA
taaacttgacctaaagaccat

SEQ ID NO: 1052 - DNA, 21 bp, synthetic construct
  source 1..21: mol_type = other DNA
acctaaagaccattgcacttc

SEQ ID NO: 1053 - DNA, 21 bp, synthetic construct
  source 1..21: mol_type = other DNA
cacttcgtgcccgaaacgccg

SEQ ID NO: 1054 - DNA, 21 bp, synthetic construct
  source 1..21: mol_type = other DNA
gtgcccgaaacgccgaatata

SEQ ID NO: 1055 - DNA, 21 bp, synthetic construct
  source 1..21: mol_type = other DNA
tctctgaccattgtagcggtt

SEQ ID NO: 1056 - DNA, 21 bp, synthetic construct
  source 1..21: mol_type = other DNA
tagcggtttgctgcggtaatc

SEQ ID NO: 1057 - DNA, 21 bp, synthetic construct
  source 1..21: mol_type = other DNA
gctgcggtaatcatgaggata

SEQ ID NO: 1058 - DNA, 21 bp, synthetic construct
  source 1..21: mol_type = other DNA
ctgcggtaatcatgaggataa

SEQ ID NO: 1059 - DNA, 21 bp, synthetic construct
  source 1..21: mol_type = other DNA
tcagttctgggaaaatggtgt

SEQ ID NO: 1060 - DNA, 21 bp, synthetic construct
  source 1..21: mol_type = other DNA
cagttctgggaaaatggtgtg

SEQ ID NO: 1061 - DNA, 21 bp, synthetic construct
  source 1..21: mol_type = other DNA
agttctgggaaaatggtgtgc

SEQ ID NO: 1062 - DNA, 21 bp, synthetic construct
  source 1..21: mol_type = other DNA
tgggaaaatggtgtgcacagg

SEQ ID NO: 1063 - DNA, 21 bp, synthetic construct
  source 1..21: mol_type = other DNA
tttcctttccctagtgaagaa

SEQ ID NO: 1064 - DNA, 21 bp, synthetic construct
  source 1..21: mol_type = other DNA
ttcctttccctagtgaagaac

SEQ ID NO: 1065 - DNA, 21 bp, synthetic construct
  source 1..21: mol_type = other DNA
tcctttccctagtgaagaaca

SEQ ID NO: 1066 - DNA, 21 bp, synthetic construct
  source 1..21: mol_type = other DNA
cctttccctagtgaagaacag

SEQ ID NO: 1067 - DNA, 21 bp, synthetic construct
  source 1..21: mol_type = other DNA
ctttccctagtgaagaacagt

SEQ ID NO: 1068 - DNA, 21 bp, synthetic construct
  source 1..21: mol_type = other DNA
ccctagtgaagaacagtccag

SEQ ID NO: 1069 - DNA, 21 bp, synthetic construct
  source 1..21: mol_type = other DNA
cctagtgaagaacagtccaga

SEQ ID NO: 1070 - DNA, 21 bp, synthetic construct
  source 1..21: mol_type = other DNA
tacagaagttgggttttccag

SEQ ID NO: 1071 - DNA, 21 bp, synthetic construct
  source 1..21: mol_type = other DNA
ggttttccagctaagttcttg

SEQ ID NO: 1072 - DNA, 21 bp, synthetic construct
  source 1..21: mol_type = other DNA
tccagctaagttcttggactt

SEQ ID NO: 1073 - DNA, 21 bp, synthetic construct
  source 1..21: mol_type = other DNA
ccagctaagttcttggacttc

SEQ ID NO: 1074 - DNA, 21 bp, synthetic construct
  source 1..21: mol_type = other DNA
cagctaagttcttggacttca

SEQ ID NO: 1075 - DNA, 21 bp, synthetic construct
  source 1..21: mol_type = other DNA
ttggacttcaagattcagaat

SEQ ID NO: 1076 - DNA, 21 bp, synthetic construct
  source 1..21: mol_type = other DNA
gacttcaagattcagaatatg

SEQ ID NO: 1077 - DNA, 21 bp, synthetic construct
  source 1..21: mol_type = other DNA
aagattcagaatatggtgggg

SEQ ID NO: 1078 - DNA, 21 bp, synthetic construct
  source 1..21: mol_type = other DNA
agaatatggtggggagctgtg

SEQ ID NO: 1079 - DNA, 21 bp, synthetic construct
  source 1..21: mol_type = other DNA
cctataaggttagaaggcctt

SEQ ID NO: 1080 - DNA, 21 bp, synthetic construct
  source 1..21: mol_type = other DNA
ctataaggttagaaggccttg

SEQ ID NO: 1081 - DNA, 21 bp, synthetic construct
  source 1..21: mol_type = other DNA
tgctcacccaccaacaattta

SEQ ID NO: 1082 - DNA, 21 bp, synthetic construct
  source 1..21: mol_type = other DNA
ttgcaattttccttctagtta

SEQ ID NO: 1083 - DNA, 21 bp, synthetic construct
  source 1..21: mol_type = other DNA
tgcaattttccttctagttat

SEQ ID NO: 1084 - DNA, 21 bp, synthetic construct
  source 1..21: mol_type = other DNA
gcaattttccttctagttatg

SEQ ID NO: 1085 - DNA, 21 bp, synthetic construct
  source 1..21: mol_type = other DNA
caattttccttctagttatga

SEQ ID NO: 1086 - DNA, 21 bp, synthetic construct
  source 1..21: mol_type = other DNA
tccttctagttatgagccaga

SEQ ID NO: 1087 - DNA, 21 bp, synthetic construct
  source 1..21: mol_type = other DNA
ccttctagttatgagccagag

SEQ ID NO: 1088 - DNA, 21 bp, synthetic construct
  source 1..21: mol_type = other DNA
cttctagttatgagccagagt

SEQ ID NO: 1089 - DNA, 21 bp, synthetic construct
  source 1..21: mol_type = other DNA
tagttatgagccagagttatt

SEQ ID NO: 1090 - DNA, 21 bp, synthetic construct
  source 1..21: mol_type = other DNA
tgagccagagttatttcctgg

SEQ ID NO: 1091 - DNA, 21 bp, synthetic construct
  source 1..21: mol_type = other DNA
cctggtttaatctacagaatg

SEQ ID NO: 1092 - DNA, 21 bp, synthetic construct
  source 1..21: mol_type = other DNA
ctggtttaatctacagaatga

SEQ ID NO: 1093 - DNA, 21 bp, synthetic construct
  source 1..21: mol_type = other DNA
aatctacagaatgatcaaacc

SEQ ID NO: 1094 - DNA, 21 bp, synthetic construct
  source 1..21: mol_type = other DNA
atctacagaatgatcaaaccc

SEQ ID NO: 1095 - DNA, 21 bp, synthetic construct
  source 1..21: mol_type = other DNA
ttctccttatttttgtttctg

SEQ ID NO: 1096 - DNA, 21 bp, synthetic construct
  source 1..21: mol_type = other DNA
tccttatttttgtttctggaa

SEQ ID NO: 1097 - DNA, 21 bp, synthetic construct
  source 1..21: mol_type = other DNA
tttttgtttctggaaaagttg

SEQ ID NO: 1098 - DNA, 21 bp, synthetic construct
  source 1..21: mol_type = other DNA
ttgtttctggaaaagttgtat

SEQ ID NO: 1099 - DNA, 21 bp, synthetic construct
  source 1..21: mol_type = other DNA
tgtttctggaaaagttgtatt

SEQ ID NO: 1100 - DNA, 21 bp, synthetic construct
  source 1..21: mol_type = other DNA
gtttctggaaaagttgtatta

SEQ ID NO: 1101 - DNA, 21 bp, synthetic construct
  source 1..21: mol_type = other DNA
tttctggaaaagttgtattaa

SEQ ID NO: 1102 - DNA, 21 bp, synthetic construct
  source 1..21: mol_type = other DNA
ctggaaaagttgtattaacag

SEQ ID NO: 1103 - DNA, 21 bp, synthetic construct
  source 1..21: mol_type = other DNA
tggaaaagttgtattaacagg

SEQ ID NO: 1104 - DNA, 21 bp, synthetic construct
  source 1..21: mol_type = other DNA
tcttcttaggtgctaaagtca

SEQ ID NO: 1105 - DNA, 21 bp, synthetic construct
  source 1..21: mol_type = other DNA
ttaggtgctaaagtcagagca

SEQ ID NO: 1106 - DNA, 21 bp, synthetic construct
  source 1..21: mol_type = other DNA
ggtgctaaagtcagagcagaa

SEQ ID NO: 1107 - DNA, 21 bp, synthetic construct
  source 1..21: mol_type = other DNA
taaagggattcaggaagacga

SEQ ID NO: 1108 - DNA, 21 bp, synthetic construct
  source 1..21: mol_type = other DNA
ggtcaagtttacaaccaagat

SEQ ID NO: 1109 - DNA, 21 bp, synthetic construct
  source 1..21: mol_type = other DNA
aggtcaagtttacaaccaaga

SEQ ID NO: 1110 - DNA, 21 bp, synthetic construct
  source 1..21: mol_type = other DNA
gggcacgaagtgcaatggtct

SEQ ID NO: 1111 - DNA, 21 bp, synthetic construct
  source 1..21: mol_type = other DNA
cgggcacgaagtgcaatggtc

SEQ ID NO: 1112 - DNA, 21 bp, synthetic construct
  source 1..21: mol_type = other DNA
ggcgtttcgggcacgaagtgc

SEQ ID NO: 1113 - DNA, 21 bp, synthetic construct
  source 1..21: mol_type = other DNA
tattcggcgtttcgggcacga

SEQ ID NO: 1114 - DNA, 21 bp, synthetic construct
  source 1..21: mol_type = other DNA
ggattatattcggcgtttcgg

SEQ ID NO: 1115 - DNA, 21 bp, synthetic construct
  source 1..21: mol_type = other DNA
aaatagatctaaccttgggat

SEQ ID NO: 1116 - DNA, 21 bp, synthetic construct
  source 1..21: mol_type = other DNA
tcctcatgattaccgcagcaa

SEQ ID NO: 1117 - DNA, 21 bp, synthetic construct
  source 1..21: mol_type = other DNA
gtggctctcttatcctcatga

SEQ ID NO: 1118 - DNA, 21 bp, synthetic construct
  source 1..21: mol_type = other DNA
ccagaactgaaaatcagtgcc

SEQ ID NO: 1119 - DNA, 21 bp, synthetic construct
  source 1..21: mol_type = other DNA
cccagaactgaaaatcagtgc

SEQ ID NO: 1120 - DNA, 21 bp, synthetic construct
  source 1..21: mol_type = other DNA
tcccagaactgaaaatcagtg

SEQ ID NO: 1121 - DNA, 21 bp, synthetic construct
  source 1..21: mol_type = other DNA
gctcctgtgcacaccattttc

SEQ ID NO: 1122 - DNA, 21 bp, synthetic construct
  source 1..21: mol_type = other DNA
cggctacctcttggctcctgt

SEQ ID NO: 1123 - DNA, 21 bp, synthetic construct
  source 1..21: mol_type = other DNA
ttacggctacctcttggctcc

SEQ ID NO: 1124 - DNA, 21 bp, synthetic construct
  source 1..21: mol_type = other DNA
cttacggctacctcttggctc

SEQ ID NO: 1125 - DNA, 21 bp, synthetic construct
  source 1..21: mol_type = other DNA
ctgccagtctggactgttctt

SEQ ID NO: 1126 - DNA, 21 bp, synthetic construct
  source 1..21: mol_type = other DNA
ttgctgccagtctggactgtt

SEQ ID NO: 1127 - DNA, 21 bp, synthetic construct
  source 1..21: mol_type = other DNA
cttgctgccagtctggactgt

SEQ ID NO: 1128 - DNA, 21 bp, synthetic construct
  source 1..21: mol_type = other DNA
tcttgctgccagtctggactg

SEQ ID NO: 1129 - DNA, 21 bp, synthetic construct
  source 1..21: mol_type = other DNA
tgtacaactctagcatatttt

SEQ ID NO: 1130 - DNA, 21 bp, synthetic construct
  source 1..21: mol_type = other DNA
gctggaaaacccaacttctgt

SEQ ID NO: 1131 - DNA, 21 bp, synthetic construct
  source 1..21: mol_type = other DNA
aagtccaagaacttagctgga

SEQ ID NO: 1132 - DNA, 21 bp, synthetic construct
  source 1..21: mol_type = other DNA
tgaatcttgaagtccaagaac

SEQ ID NO: 1133 - DNA, 21 bp, synthetic construct
  source 1..21: mol_type = other DNA
acatcacagctccccaccata

SEQ ID NO: 1134 - DNA, 21 bp, synthetic construct
  source 1..21: mol_type = other DNA
taaccttataggaaacttcac

SEQ ID NO: 1135 - DNA, 21 bp, synthetic construct
  source 1..21: mol_type = other DNA
gtgggtgagcacaaggccttc

SEQ ID NO: 1136 - DNA, 21 bp, synthetic construct
  source 1..21: mol_type = other DNA
ttggtgggtgagcacaaggcc

SEQ ID NO: 1137 - DNA, 21 bp, synthetic construct
  source 1..21: mol_type = other DNA
cctactaaattgttggtgggt

SEQ ID NO: 1138 - DNA, 21 bp, synthetic construct
  source 1..21: mol_type = other DNA
agacttacctactaaattgtt

SEQ ID NO: 1139 - DNA, 21 bp, synthetic construct
  source 1..21: mol_type = other DNA
cagacttacctactaaattgt

SEQ ID NO: 1140 - DNA, 21 bp, synthetic construct
  source 1..21: mol_type = other DNA
aaccaggaaataactctggct

SEQ ID NO: 1141 - DNA, 21 bp, synthetic construct
  source 1..21: mol_type = other DNA
tgtagattaaaccaggaaata

SEQ ID NO: 1142 - DNA, 21 bp, synthetic construct
  source 1..21: mol_type = other DNA
atcattctgtagattaaacca

SEQ ID NO: 1143 - DNA, 21 bp, synthetic construct
  source 1..21: mol_type = other DNA
gatcattctgtagattaaacc

SEQ ID NO: 1144 - DNA, 21 bp, synthetic construct
  source 1..21: mol_type = other DNA
tgggtttgatcattctgtaga

SEQ ID NO: 1145 - DNA, 21 bp, synthetic construct
  source 1..21: mol_type = other DNA
cagaaacaaaaataaggagaa

SEQ ID NO: 1146 - DNA, 21 bp, synthetic construct
  source 1..21: mol_type = other DNA
ccagaaacaaaaataaggaga

SEQ ID NO: 1147 - DNA, 21 bp, synthetic construct
  source 1..21: mol_type = other DNA
tccagaaacaaaaataaggag

SEQ ID NO: 1148 - DNA, 21 bp, synthetic construct
  source 1..21: mol_type = other DNA
atacaacttttccagaaacaa

SEQ ID NO: 1149 - DNA, 21 bp, synthetic construct
  source 1..21: mol_type = other DNA
cctgttaatacaacttttcca

SEQ ID NO: 1150 - DNA, 21 bp, synthetic construct
  source 1..21: mol_type = other DNA
caacttacctgttaatacaac

SEQ ID NO: 1151 - DNA, 21 bp, synthetic construct
  source 1..21: mol_type = other DNA
ctgttacaacttacctgttaa

SEQ ID NO: 1152 - DNA, 21 bp, synthetic construct
  source 1..21: mol_type = other DNA
tgctctgactttagcacctaa

SEQ ID NO: 1153 - DNA, 21 bp, synthetic construct
  source 1..21: mol_type = other DNA
ctgctctgactttagcaccta

SEQ ID NO: 1154 - DNA, 21 bp, synthetic construct
  source 1..21: mol_type = other DNA
ataaatttctgctctgacttt

SEQ ID NO: 1155 - DNA, 21 bp, synthetic construct
  source 1..21: mol_type = other DNA
aaatgcttcataaatttctgc

SEQ ID NO: 1156 - DNA, 21 bp, synthetic construct
  source 1..21: mol_type = other DNA
caaatgcttcataaatttctg

SEQ ID NO: 1157 - DNA, 21 bp, synthetic construct
  source 1..21: mol_type = other DNA
tcaaatgcttcataaatttct

SEQ ID NO: 1158 - DNA, 21 bp, synthetic construct
  source 1..21: mol_type = other DNA
ctgaatccctttagaataggg

SEQ ID NO: 1159 - DNA, 21 bp, synthetic construct
  source 1..21: mol_type = other DNA
cgtcgtcttcctgaatccctt

SEQ ID NO: 1160 - DNA, 21 bp, synthetic construct
  source 1..21: mol_type = other DNA
gggggctatcattgtagtgag

SEQ ID NO: 1161 - DNA, 21 bp, synthetic construct
  source 1..21: mol_type = other DNA
ggggctatcattgtagtgagt

SEQ ID NO: 1162 - DNA, 21 bp, synthetic construct
  source 1..21: mol_type = other DNA
tagtgagtggcggccctggga

SEQ ID NO: 1163 - DNA, 21 bp, synthetic construct
  source 1..21: mol_type = other DNA
actcccactgggcccaacaac

SEQ ID NO: 1164 - DNA, 21 bp, synthetic construct
  source 1..21: mol_type = other DNA
tgccctgctggacagcagcag

SEQ ID NO: 1165 - DNA, 21 bp, synthetic construct
  source 1..21: mol_type = other DNA
gtccggacccaacccttctac

SEQ ID NO: 1166 - DNA, 21 bp, synthetic construct
  source 1..21: mol_type = other DNA
tacctcctttgagcccatcaa

SEQ ID NO: 1167 - DNA, 21 bp, synthetic construct
  source 1..21: mol_type = other DNA
gagcccatcaaggcagacccc

SEQ ID NO: 1168 - DNA, 21 bp, synthetic construct
  source 1..21: mol_type = other DNA
agcccatcaaggcagacccca

SEQ ID NO: 1169 - DNA, 21 bp, synthetic construct
  source 1..21: mol_type = other DNA
cttgtttttcagttttggaac

SEQ ID NO: 1170 - DNA, 21 bp, synthetic construct
  source 1..21: mol_type = other DNA
tttttcagttttggaactccc

SEQ ID NO: 1171 - DNA, 21 bp, synthetic construct
  source 1..21: mol_type = other DNA
ttcagttttggaactccccaa

SEQ ID NO: 1172 - DNA, 21 bp, synthetic construct
  source 1..21: mol_type = other DNA
tcagttttggaactccccaaa

SEQ ID NO: 1173 - DNA, 21 bp, synthetic construct
  source 1..21: mol_type = other DNA
cagttttggaactccccaaag

SEQ ID NO: 1174 - DNA, 21 bp, synthetic construct
  source 1..21: mol_type = other DNA
agttttggaactccccaaaga

SEQ ID NO: 1175 - DNA, 21 bp, synthetic construct
  source 1..21: mol_type = other DNA
tggaactccccaaagagctgt

SEQ ID NO: 1176 - DNA, 21 bp, synthetic construct
  source 1..21: mol_type = other DNA
ggaactccccaaagagctgtc

SEQ ID NO: 1177 - DNA, 21 bp, synthetic construct
  source 1..21: mol_type = other DNA
ccagagtgcatgagctcggag

SEQ ID NO: 1178 - DNA, 21 bp, synthetic construct
  source 1..21: mol_type = other DNA
gcccctctgcttcgtctttct

SEQ ID NO: 1179 - DNA, 21 bp, synthetic construct
  source 1..21: mol_type = other DNA
cccctctgcttcgtctttctc

SEQ ID NO: 1180 - DNA, 21 bp, synthetic construct
  source 1..21: mol_type = other DNA
gtctttctccacccccgggag

SEQ ID NO: 1181 - DNA, 21 bp, synthetic construct
  source 1..21: mol_type = other DNA
ctccacccccgggagaccacg

SEQ ID NO: 1182 - DNA, 21 bp, synthetic construct
  source 1..21: mol_type = other DNA
tccacccccgggagaccacga

SEQ ID NO: 1183 - DNA, 21 bp, synthetic construct
  source 1..21: mol_type = other DNA
tatctacaacctggacgagag

SEQ ID NO: 1184 - DNA, 21 bp, synthetic construct
  source 1..21: mol_type = other DNA
gatgtgcctgttctcaacctc

SEQ ID NO: 1185 - DNA, 21 bp, synthetic construct
  source 1..21: mol_type = other DNA
atgtgcctgttctcaacctct

SEQ ID NO: 1186 - DNA, 21 bp, synthetic construct
  source 1..21: mol_type = other DNA
tgcactgccagggacagcagt

SEQ ID NO: 1187 - DNA, 21 bp, synthetic construct
  source 1..21: mol_type = other DNA
cctggacttctgcactgccag

SEQ ID NO: 1188 - DNA, 21 bp, synthetic construct
  source 1..21: mol_type = other DNA
ctatcagtcccagggccgcca

SEQ ID NO: 1189 - DNA, 21 bp, synthetic construct
  source 1..21: mol_type = other DNA
ggcccagtgggagtgaactga

SEQ ID NO: 1190 - DNA, 21 bp, synthetic construct
  source 1..21: mol_type = other DNA
ttgggcccagtgggagtgaac

SEQ ID NO: 1191 - DNA, 21 bp, synthetic construct
  source 1..21: mol_type = other DNA
ggtccggacgaactgctgctg

SEQ ID NO: 1192 - DNA, 21 bp, synthetic construct
  source 1..21: mol_type = other DNA
atgggctcaaaggaggtagaa

SEQ ID NO: 1193 - DNA, 21 bp, synthetic construct
  source 1..21: mol_type = other DNA
tgacagctctttggggagttc

SEQ ID NO: 1194 - DNA, 21 bp, synthetic construct
  source 1..21: mol_type = other DNA
ctgacagctctttggggagtt

SEQ ID NO: 1195 - DNA, 21 bp, synthetic construct
  source 1..21: mol_type = other DNA
tgaggacatcaactcctccag

SEQ ID NO: 1196 - DNA, 21 bp, synthetic construct
  source 1..21: mol_type = other DNA
cagggccacccaccttctgag

SEQ ID NO: 1197 - DNA, 21 bp, synthetic construct
  source 1..21: mol_type = other DNA
tagatataatcgtggtctccc

SEQ ID NO: 1198 - DNA, 21 bp, synthetic construct
  source 1..21: mol_type = other DNA
actctcgtccaggttgtagat

SEQ ID NO: 1199 - DNA, 21 bp, synthetic construct
  source 1..21: mol_type = other DNA
tgggggttcacccacttgtag

SEQ ID NO: 1200 - DNA, 21 bp, synthetic construct
  source 1..21: mol_type = other DNA
acccacttgtaggtgccctca

SEQ ID NO: 1201 - DNA, 21 bp, synthetic construct
  source 1..21: mol_type = other DNA
taggtgccctcatactggaaa

SEQ ID NO: 1202 - DNA, 21 bp, synthetic construct
  source 1..21: mol_type = other DNA
atcagctcgtctgcctccgtg

SEQ ID NO: 1203 - DNA, 21 bp, synthetic construct
  source 1..21: mol_type = other DNA
cctcacctgccataaatatag

SEQ ID NO: 1204 - DNA, 21 bp, synthetic construct
  source 1..21: mol_type = other DNA
ctcacctgccataaatatagg

SEQ ID NO: 1205 - DNA, 21 bp, synthetic construct
  source 1..21: mol_type = other DNA
ggcttctccagctcaatctgg

SEQ ID NO: 1206 - DNA, 21 bp, synthetic construct
  source 1..21: mol_type = other DNA
tccagctcaatctggtgcagc

SEQ ID NO: 1207 - DNA, 21 bp, synthetic construct
  source 1..21: mol_type = other DNA
tctgtagggcaccttgtatct

SEQ ID NO: 1208 - DNA, 21 bp, synthetic construct
  source 1..21: mol_type = other DNA
tatctgttgccgtaggtcagg

SEQ ID NO: 1209 - DNA, 21 bp, synthetic construct
  source 1..21: mol_type = other DNA
ccgtaggtcaggtccagctcc

SEQ ID NO: 1210 - DNA, 21 bp, synthetic construct
  source 1..21: mol_type = other DNA
aagaacatgcccggcttcttg

SEQ ID NO: 1211 - DNA, 21 bp, synthetic construct
  source 1..21: mol_type = other DNA
ttggtcatcatcttggtgtac

SEQ ID NO: 1212 - DNA, 21 bp, synthetic construct
  source 1..21: mol_type = other DNA
gtcatcatcttggtgtacacg

SEQ ID NO: 1213 - DNA, 21 bp, synthetic construct
  source 1..21: mol_type = other DNA
gtgtacacggcctcgttgggc

SEQ ID NO: 1214 - DNA, 21 bp, synthetic construct
  source 1..21: mol_type = other DNA
ggctgcacgcggatcaccagc

SEQ ID NO: 1215 - DNA, 21 bp, synthetic construct
  source 1..21: mol_type = other DNA
cgcttgcactgctggtggaag

SEQ ID NO: 1216 - DNA, 21 bp, synthetic construct
  source 1..21: mol_type = other DNA
cactgctggtggaagatgtcg

SEQ ID NO: 1217 - DNA, 21 bp, synthetic construct
  source 1..21: mol_type = other DNA
cgctcgttcagggccttgccg

SEQ ID NO: 1218 - DNA, 21 bp, synthetic construct
  source 1..21: mol_type = other DNA
agggccttgccgcagcgcagg

SEQ ID NO: 1219 - DNA, 21 bp, synthetic construct
  source 1..21: mol_type = other DNA
ccgcagcgcaggatgaagggc

SEQ ID NO: 1220 - DNA, 21 bp, synthetic construct
  source 1..21: mol_type = other DNA
cagtatgagggcacctacaag

SEQ ID NO: 1221 - DNA, 21 bp, synthetic construct
  source 1..21: mol_type = other DNA
ccagtatgagggcacctacaa

SEQ ID NO: 1222 - DNA, 21 bp, synthetic construct
  source 1..21: mol_type = other DNA
agctggagaagcccaagccca

SEQ ID NO: 1223 - DNA, 21 bp, synthetic construct
  source 1..21: mol_type = other DNA
accccactgctgcaccagatt

SEQ ID NO: 1224 - DNA, 21 bp, synthetic construct
  source 1..21: mol_type = other DNA
caccccactgctgcaccagat

SEQ ID NO: 1225 - DNA, 21 bp, synthetic construct
  source 1..21: mol_type = other DNA
tcaccccactgctgcaccaga

SEQ ID NO: 1226 - DNA, 21 bp, synthetic construct
  source 1..21: mol_type = other DNA
tgcgggagccagatgcacttc

SEQ ID NO: 1227 - DNA, 21 bp, synthetic construct
  source 1..21: mol_type = other DNA
aaccccgaggagtcggagctg

SEQ ID NO: 1228 - DNA, 21 bp, synthetic construct
  source 1..21: mol_type = other DNA
ttcaaccccgaggagtcggag

SEQ ID NO: 1229 - DNA, 21 bp, synthetic construct
  source 1..21: mol_type = other DNA
caccagcagtgcaagcgcaac

SEQ ID NO: 1230 - DNA, 21 bp, synthetic construct
  source 1..21: mol_type = other DNA
catgatgtggccggcgacatc

SEQ ID NO: 1231 - DNA, 21 bp, synthetic construct
  source 1..21: mol_type = other DNA
atcctgcgctgcggcaaggcc

SEQ ID NO: 1232 - DNA, 21 bp, synthetic construct
  source 1..21: mol_type = other DNA
cgccacgtaggggtgcccttc

SEQ ID NO: 1233 - DNA, 21 bp, synthetic construct
  source 1..21: mol_type = other DNA
ccgccacgtaggggtgccctt

SEQ ID NO: 1234 - DNA, 21 bp, synthetic construct
  source 1..21: mol_type = other DNA
atgaagataaattgatagcac

SEQ ID NO: 1235 - DNA, 21 bp, synthetic construct
  source 1..21: mol_type = other DNA
atagcacaaaatctagaactt

SEQ ID NO: 1236 - DNA, 21 bp, synthetic construct
  source 1..21: mol_type = other DNA
atgaaaccataaaaattggtt

SEQ ID NO: 1237 - DNA, 21 bp, synthetic construct
  source 1..21: mol_type = other DNA
gtttgactaagcttaattgct

SEQ ID NO: 1238 - DNA, 21 bp, synthetic construct
  source 1..21: mol_type = other DNA
gactaagcttaattgctttct

SEQ ID NO: 1239 - DNA, 21 bp, synthetic construct
  source 1..21: mol_type = other DNA
actaagcttaattgctttctg

SEQ ID NO: 1240 - DNA, 21 bp, synthetic construct
  source 1..21: mol_type = other DNA
attgctttctggaacaggatc

SEQ ID NO: 1241 - DNA, 21 bp, synthetic construct
  source 1..21: mol_type = other DNA
ctttctggaacaggatctgaa

SEQ ID NO: 1242 - DNA, 21 bp, synthetic construct
  source 1..21: mol_type = other DNA
ctggaacaggatctgaaactg

SEQ ID NO: 1243 - DNA, 21 bp, synthetic construct
  source 1..21: mol_type = other DNA
tggaacaggatctgaaactgg

SEQ ID NO: 1244 - DNA, 21 bp, synthetic construct
  source 1..21: mol_type = other DNA
tctaatgtccgttaaaggtac

SEQ ID NO: 1245 - DNA, 21 bp, synthetic construct
  source 1..21: mol_type = other DNA
aaggtacgacaccacagagga

SEQ ID NO: 1246 - DNA, 21 bp, synthetic construct
  source 1..21: mol_type = other DNA
tttatacccatcaacactggt

SEQ ID NO: 1247 - DNA, 21 bp, synthetic construct
  source 1..21: mol_type = other DNA
atacccatcaacactggtaag

SEQ ID NO: 1248 - DNA, 21 bp, synthetic construct
  source 1..21: mol_type = other DNA
tacccatcaacactggtaaga

SEQ ID NO: 1249 - DNA, 21 bp, synthetic construct
  source 1..21: mol_type = other DNA
atcagctgaaaaggaaacagc

SEQ ID NO: 1250 - DNA, 21 bp, synthetic construct
  source 1..21: mol_type = other DNA
atgatgctaaactgttcagaa

SEQ ID NO: 1251 - DNA, 21 bp, synthetic construct
  source 1..21: mol_type = other DNA
agaaaacaacaaagaagagac

SEQ ID NO: 1252 - DNA, 21 bp, synthetic construct
  source 1..21: mol_type = other DNA
cttcttttaggatgtggatgt

SEQ ID NO: 1253 - DNA, 21 bp, synthetic construct
  source 1..21: mol_type = other DNA
ttcttttaggatgtggatgta

SEQ ID NO: 1254 - DNA, 21 bp, synthetic construct
  source 1..21: mol_type = other DNA
ttttaggatgtggatgtagaa

SEQ ID NO: 1255 - DNA, 21 bp, synthetic construct
  source 1..21: mol_type = other DNA
taggatgtggatgtagaagag

SEQ ID NO: 1256 - DNA, 21 bp, synthetic construct
  source 1..21: mol_type = other DNA
aggatgtggatgtagaagagg

SEQ ID NO: 1257 - DNA, 21 bp, synthetic construct
  source 1..21: mol_type = other DNA
ggatgtggatgtagaagaggc

SEQ ID NO: 1258 - DNA, 21 bp, synthetic construct
  source 1..21: mol_type = other DNA
tggggcagtatactgaagaac

SEQ ID NO: 1259 - DNA, 21 bp, synthetic construct
  source 1..21: mol_type = other DNA
ttcatcaattggcggggttcc

SEQ ID NO: 1260 - DNA, 21 bp, synthetic construct
  source 1..21: mol_type = other DNA
atcaattggcggggttccatt

SEQ ID NO: 1261 - DNA, 21 bp, synthetic construct
  source 1..21: mol_type = other DNA
gcggggttccatttttccagg

SEQ ID NO: 1262 - DNA, 21 bp, synthetic construct
  source 1..21: mol_type = other DNA
tcccgccttaaatccacagca

SEQ ID NO: 1263 - DNA, 21 bp, synthetic construct
  source 1..21: mol_type = other DNA
cccgccttaaatccacagcat

SEQ ID NO: 1264 - DNA, 21 bp, synthetic construct
  source 1..21: mol_type = other DNA
ccgccttaaatccacagcata

SEQ ID NO: 1265 - DNA, 21 bp, synthetic construct
  source 1..21: mol_type = other DNA
aatccacagcataaaaaatca

SEQ ID NO: 1266 - DNA, 21 bp, synthetic construct
  source 1..21: mol_type = other DNA
acacactggagaggtctaaag

SEQ ID NO: 1267 - DNA, 21 bp, synthetic construct
  source 1..21: mol_type = other DNA
gttacaaagagcagattacct

SEQ ID NO: 1268 - DNA, 21 bp, synthetic construct
  source 1..21: mol_type = other DNA
caaagagcagattacctctgc

SEQ ID NO: 1269 - DNA, 21 bp, synthetic construct
  source 1..21: mol_type = other DNA
cctctgcgagcccagatcaac

SEQ ID NO: 1270 - DNA, 21 bp, synthetic construct
  source 1..21: mol_type = other DNA
tagattttgtgctatcaattt

SEQ ID NO: 1271 - DNA, 21 bp, synthetic construct
  source 1..21: mol_type = other DNA
agttctagattttgtgctatc

SEQ ID NO: 1272 - DNA, 21 bp, synthetic construct
  source 1..21: mol_type = other DNA
attaagttctagattttgtgc

SEQ ID NO: 1273 - DNA, 21 bp, synthetic construct
  source 1..21: mol_type = other DNA
cattaagttctagattttgtg

SEQ ID NO: 1274 - DNA, 21 bp, synthetic construct
  source 1..21: mol_type = other DNA
tggtttcattaagttctagat

SEQ ID NO: 1275 - DNA, 21 bp, synthetic construct
  source 1..21: mol_type = other DNA
atggtttcattaagttctaga

SEQ ID NO: 1276 - DNA, 21 bp, synthetic construct
  source 1..21: mol_type = other DNA
tatggtttcattaagttctag

SEQ ID NO: 1277 - DNA, 21 bp, synthetic construct
  source 1..21: mol_type = other DNA
ttatggtttcattaagttcta

SEQ ID NO: 1278 - DNA, 21 bp, synthetic construct
  source 1..21: mol_type = other DNA
gtcaaaccaatttttatggtt

SEQ ID NO: 1279 - DNA, 21 bp, synthetic construct
  source 1..21: mol_type = other DNA
agcttagtcaaaccaattttt

SEQ ID NO: 1280 - DNA, 21 bp, synthetic construct
  source 1..21: mol_type = other DNA
cagaaagcaattaagcttagt

SEQ ID NO: 1281 - DNA, 21 bp, synthetic construct
  source 1..21: mol_type = other DNA
agatcctgttccagaaagcaa

SEQ ID NO: 1282 - DNA, 21 bp, synthetic construct
  source 1..21: mol_type = other DNA
cagatcctgttccagaaagca

SEQ ID NO: 1283 - DNA, 21 bp, synthetic construct
  source 1..21: mol_type = other DNA
ggatatccagtttcagatcct

SEQ ID NO: 1284 - DNA, 21 bp, synthetic construct
  source 1..21: mol_type = other DNA
aagtacctgttgggatatcca

SEQ ID NO: 1285 - DNA, 21 bp, synthetic construct
  source 1..21: mol_type = other DNA
aaagtacctgttgggatatcc

SEQ ID NO: 1286 - DNA, 21 bp, synthetic construct
  source 1..21: mol_type = other DNA
taaagtacctgttgggatatc

SEQ ID NO: 1287 - DNA, 21 bp, synthetic construct
  source 1..21: mol_type = other DNA
tcttttaaagtacctgttggg

SEQ ID NO: 1288 - DNA, 21 bp, synthetic construct
  source 1..21: mol_type = other DNA
ctcttttaaagtacctgttgg

SEQ ID NO: 1289 - DNA, 21 bp, synthetic construct
  source 1..21: mol_type = other DNA
tatttctcttttaaagtacct

SEQ ID NO: 1290 - DNA, 21 bp, synthetic construct
  source 1..21: mol_type = other DNA
ctctgtggtgtcgtaccttta

SEQ ID NO: 1291 - DNA, 21 bp, synthetic construct
  source 1..21: mol_type = other DNA
cctctgtggtgtcgtaccttt

SEQ ID NO: 1292 - DNA, 21 bp, synthetic construct
  source 1..21: mol_type = other DNA
tcctctgtggtgtcgtacctt

SEQ ID NO: 1293 - DNA, 21 bp, synthetic construct
  source 1..21: mol_type = other DNA
atgggtataaataacttttcc

SEQ ID NO: 1294 - DNA, 21 bp, synthetic construct
  source 1..21: mol_type = other DNA
ccagtgttgatgggtataaat

SEQ ID NO: 1295 - DNA, 21 bp, synthetic construct
  source 1..21: mol_type = other DNA
ttaccagtgttgatgggtata

SEQ ID NO: 1296 - DNA, 21 bp, synthetic construct
  source 1..21: mol_type = other DNA
agttcttaccagtgttgatgg

SEQ ID NO: 1297 - DNA, 21 bp, synthetic construct
  source 1..21: mol_type = other DNA
acgtggttcagttcttaccag

SEQ ID NO: 1298 - DNA, 21 bp, synthetic construct
  source 1..21: mol_type = other DNA
agctgatcaaggagatgttca

SEQ ID NO: 1299 - DNA, 21 bp, synthetic construct
  source 1..21: mol_type = other DNA
cagctgatcaaggagatgttc

SEQ ID NO: 1300 - DNA, 21 bp, synthetic construct
  source 1..21: mol_type = other DNA
tcagctgatcaaggagatgtt

SEQ ID NO: 1301 - DNA, 21 bp, synthetic construct
  source 1..21: mol_type = other DNA
cttttcagctgatcaaggaga

SEQ ID NO: 1302 - DNA, 21 bp, synthetic construct
  source 1..21: mol_type = other DNA
ccttttcagctgatcaaggag

SEQ ID NO: 1303 - DNA, 21 bp, synthetic construct
  source 1..21: mol_type = other DNA
acagctcaggctgtttccttt

SEQ ID NO: 1304 - DNA, 21 bp, synthetic construct
  source 1..21: mol_type = other DNA
gcatcattaacagctcaggct

SEQ ID NO: 1305 - DNA, 21 bp, synthetic construct
  source 1..21: mol_type = other DNA
agcatcattaacagctcaggc

SEQ ID NO: 1306 - DNA, 21 bp, synthetic construct
  source 1..21: mol_type = other DNA
tgaacagtttagcatcattaa

SEQ ID NO: 1307 - DNA, 21 bp, synthetic construct
  source 1..21: mol_type = other DNA
ctgaacagtttagcatcatta

SEQ ID NO: 1308 - DNA, 21 bp, synthetic construct
  source 1..21: mol_type = other DNA
tctgaacagtttagcatcatt

SEQ ID NO: 1309 - DNA, 21 bp, synthetic construct
  source 1..21: mol_type = other DNA
ttttctgaacagtttagcatc

SEQ ID NO: 1310 - DNA, 21 bp, synthetic construct
  source 1..21: mol_type = other DNA
ttgttttctgaacagtttagc

SEQ ID NO: 1311 - DNA, 21 bp, synthetic construct
  source 1..21: mol_type = other DNA
tttgttgttttctgaacagtt

SEQ ID NO: 1312 - DNA, 21 bp, synthetic construct
  source 1..21: mol_type = other DNA
tctcttctttgttgttttctg

SEQ ID NO: 1313 - DNA, 21 bp, synthetic construct
  source 1..21: mol_type = other DNA
ccggaattgtctcttctttgt

SEQ ID NO: 1314 - DNA, 21 bp, synthetic construct
  source 1..21: mol_type = other DNA
accggaattgtctcttctttg

SEQ ID NO: 1315 - DNA, 21 bp, synthetic construct
  source 1..21: mol_type = other DNA
aatttaccggaattgtctctt

SEQ ID NO: 1316 - DNA, 21 bp, synthetic construct
  source 1..21: mol_type = other DNA
aaatttaccggaattgtctct

SEQ ID NO: 1317 - DNA, 21 bp, synthetic construct
  source 1..21: mol_type = other DNA
agtatactgccccagaactgc

SEQ ID NO: 1318 - DNA, 21 bp, synthetic construct
  source 1..21: mol_type = other DNA
ttcagtatactgccccagaac

SEQ ID NO: 1319 - DNA, 21 bp, synthetic construct
  source 1..21: mol_type = other DNA
gaggttcttcagtatactgcc

SEQ ID NO: 1320 - DNA, 21 bp, synthetic construct
  source 1..21: mol_type = other DNA
acttagaggttcttcagtata

SEQ ID NO: 1321 - DNA, 21 bp, synthetic construct
  source 1..21: mol_type = other DNA
atgaacaatccacaccagcat

SEQ ID NO: 1322 - DNA, 21 bp, synthetic construct
  source 1..21: mol_type = other DNA
tctgatatgacatacctggaa

SEQ ID NO: 1323 - DNA, 21 bp, synthetic construct
  source 1..21: mol_type = other DNA
catgtgattttttatgctgtg

SEQ ID NO: 1324 - DNA, 21 bp, synthetic construct
  source 1..21: mol_type = other DNA
ccatgtgattttttatgctgt

SEQ ID NO: 1325 - DNA, 21 bp, synthetic construct
  source 1..21: mol_type = other DNA
tccatgtgattttttatgctg

SEQ ID NO: 1326 - DNA, 21 bp, synthetic construct
  source 1..21: mol_type = other DNA
tcttttccatgtgatttttta

SEQ ID NO: 1327 - DNA, 21 bp, synthetic construct
  source 1..21: mol_type = other DNA
gtcttttccatgtgatttttt

SEQ ID NO: 1328 - DNA, 21 bp, synthetic construct
  source 1..21: mol_type = other DNA
tttgtcttttccatgtgattt

SEQ ID NO: 1329 - DNA, 21 bp, synthetic construct
  source 1..21: mol_type = other DNA
ctttgtcttttccatgtgatt

SEQ ID NO: 1330 - DNA, 21 bp, synthetic construct
  source 1..21: mol_type = other DNA
tctttgtcttttccatgtgat

SEQ ID NO: 1331 - DNA, 21 bp, synthetic construct
  source 1..21: mol_type = other DNA
atgcctctgttttctttgtct

SEQ ID NO: 1332 - DNA, 21 bp, synthetic construct
  source 1..21: mol_type = other DNA
gacctctccagtgtgttaatg

SEQ ID NO: 1333 - DNA, 21 bp, synthetic construct
  source 1..21: mol_type = other DNA
agacctctccagtgtgttaat

SEQ ID NO: 1334 - DNA, 21 bp, synthetic construct
  source 1..21: mol_type = other DNA
cactttagacctctccagtgt

SEQ ID NO: 1335 - DNA, 21 bp, synthetic construct
  source 1..21: mol_type = other DNA
ttccactttagacctctccag

SEQ ID NO: 1336 - DNA, 21 bp, synthetic construct
  source 1..21: mol_type = other DNA
cttccactttagacctctcca

SEQ ID NO: 1337 - DNA, 21 bp, synthetic construct
  source 1..21: mol_type = other DNA
taaccaagtgctctgtagttt

SEQ ID NO: 1338 - DNA, 21 bp, synthetic construct
  source 1..21: mol_type = other DNA
gtaaccaagtgctctgtagtt

SEQ ID NO: 1339 - DNA, 21 bp, synthetic construct
  source 1..21: mol_type = other DNA
atctgggctcgcagaggtaat

SEQ ID NO: 1340 - DNA, 21 bp, synthetic construct
  source 1..21: mol_type = other DNA
aaggttgatctgggctcgcag

SEQ ID NO: 1341 - DNA, 21 bp, synthetic construct
  source 1..21: mol_type = other DNA
ccaacccccaagtgaattaaa

SEQ ID NO: 1342 - DNA, 21 bp, synthetic construct
  source 1..21: mol_type = other DNA
tgcagaccacagtccatgcca

SEQ ID NO: 1343 - DNA, 21 bp, synthetic construct
  source 1..21: mol_type = other DNA
gcagaccacagtccatgccat

SEQ ID NO: 1344 - DNA, 21 bp, synthetic construct
  source 1..21: mol_type = other DNA
cagaccacagtccatgccatc

SEQ ID NO: 1345 - DNA, 21 bp, synthetic construct
  source 1..21: mol_type = other DNA
tcatcttctaggtatgacaac

SEQ ID NO: 1346 - DNA, 21 bp, synthetic construct
  source 1..21: mol_type = other DNA
catcttctaggtatgacaacg

SEQ ID NO: 1347 - DNA, 21 bp, synthetic construct
  source 1..21: mol_type = other DNA
atcttctaggtatgacaacga

SEQ ID NO: 1348 - DNA, 21 bp, synthetic construct
  source 1..21: mol_type = other DNA
taggtatgacaacgaatttgg

SEQ ID NO: 1349 - DNA, 21 bp, synthetic construct
  source 1..21: mol_type = other DNA
cccagctctcataccatgagt

SEQ ID NO: 1350 - DNA, 21 bp, synthetic construct
  source 1..21: mol_type = other DNA
tatccacagtgaatcttggtt

SEQ ID NO: 1351 - DNA, 21 bp, synthetic construct
  source 1..21: mol_type = other DNA
gttgtaaacttgacctaaaga

SEQ ID NO: 1352 - DNA, 21 bp, synthetic construct
  source 1..21: mol_type = other DNA
taaacttgacctaaagaccat

SEQ ID NO: 1353 - DNA, 21 bp, synthetic construct
  source 1..21: mol_type = other DNA
acctaaagaccattgcacttc

SEQ ID NO: 1354 - DNA, 21 bp, synthetic construct
  source 1..21: mol_type = other DNA
cacttcgtgcccgaaacgccg

SEQ ID NO: 1355 - DNA, 21 bp, synthetic construct
  source 1..21: mol_type = other DNA
gtgcccgaaacgccgaatata

SEQ ID NO: 1356 - DNA, 21 bp, synthetic construct
  source 1..21: mol_type = other DNA
tctctgaccattgtagcggtt

SEQ ID NO: 1357 - DNA, 21 bp, synthetic construct
  source 1..21: mol_type = other DNA
tagcggtttgctgcggtaatc

SEQ ID NO: 1358 - DNA, 21 bp, synthetic construct
  source 1..21: mol_type = other DNA
gctgcggtaatcatgaggata

SEQ ID NO: 1359 - DNA, 21 bp, synthetic construct
  source 1..21: mol_type = other DNA
ctgcggtaatcatgaggataa

SEQ ID NO: 1360 - DNA, 21 bp, synthetic construct
  source 1..21: mol_type = other DNA
tcagttctgggaaaatggtgt

SEQ ID NO: 1361 - DNA, 21 bp, synthetic construct
  source 1..21: mol_type = other DNA
cagttctgggaaaatggtgtg

SEQ ID NO: 1362 - DNA, 21 bp, synthetic construct
  source 1..21: mol_type = other DNA
agttctgggaaaatggtgtgc

SEQ ID NO: 1363 - DNA, 21 bp, synthetic construct
  source 1..21: mol_type = other DNA
tgggaaaatggtgtgcacagg

SEQ ID NO: 1364 - DNA, 21 bp, synthetic construct
  source 1..21: mol_type = other DNA
tttcctttccctagtgaagaa

SEQ ID NO: 1365 - DNA, 21 bp, synthetic construct
  source 1..21: mol_type = other DNA
ttcctttccctagtgaagaac

SEQ ID NO: 1366 - DNA, 21 bp, synthetic construct
  source 1..21: mol_type = other DNA
tcctttccctagtgaagaaca

SEQ ID NO: 1367 - DNA, 21 bp, synthetic construct
  source 1..21: mol_type = other DNA
cctttccctagtgaagaacag

SEQ ID NO: 1368 - DNA, 21 bp, synthetic construct
  source 1..21: mol_type = other DNA
ctttccctagtgaagaacagt

SEQ ID NO: 1369 - DNA, 21 bp, synthetic construct
  source 1..21: mol_type = other DNA
ccctagtgaagaacagtccag

SEQ ID NO: 1370 - DNA, 21 bp, synthetic construct
  source 1..21: mol_type = other DNA
cctagtgaagaacagtccaga

SEQ ID NO: 1371 - DNA, 21 bp, synthetic construct
  source 1..21: mol_type = other DNA
tacagaagttgggttttccag

SEQ ID NO: 1372 - DNA, 21 bp, synthetic construct
  source 1..21: mol_type = other DNA
ggttttccagctaagttcttg

SEQ ID NO: 1373 - DNA, 21 bp, synthetic construct
  source 1..21: mol_type = other DNA
tccagctaagttcttggactt

SEQ ID NO: 1374 - DNA, 21 bp, synthetic construct
  source 1..21: mol_type = other DNA
ccagctaagttcttggacttc

SEQ ID NO: 1375 - DNA, 21 bp, synthetic construct
  source 1..21: mol_type = other DNA
cagctaagttcttggacttca

SEQ ID NO: 1376 - DNA, 21 bp, synthetic construct
  source 1..21: mol_type = other DNA
ttggacttcaagattcagaat

SEQ ID NO: 1377 - DNA, 21 bp, synthetic construct
  source 1..21: mol_type = other DNA
gacttcaagattcagaatatg

SEQ ID NO: 1378 - DNA, 21 bp, synthetic construct
  source 1..21: mol_type = other DNA
aagattcagaatatggtgggg

SEQ ID NO: 1379 - DNA, 21 bp, synthetic construct
  source 1..21: mol_type = other DNA
agaatatggtggggagctgtg

SEQ ID NO: 1380 - DNA, 21 bp, synthetic construct
  source 1..21: mol_type = other DNA
cctataaggttagaaggcctt

SEQ ID NO: 1381 - DNA, 21 bp, synthetic construct
  source 1..21: mol_type = other DNA
ctataaggttagaaggccttg

SEQ ID NO: 1382 - DNA, 21 bp, synthetic construct
  source 1..21: mol_type = other DNA
tgctcacccaccaacaattta

SEQ ID NO: 1383 - DNA, 21 bp, synthetic construct
  source 1..21: mol_type = other DNA
ttgcaattttccttctagtta

SEQ ID NO: 1384 - DNA, 21 bp, synthetic construct
  source 1..21: mol_type = other DNA
tgcaattttccttctagttat

SEQ ID NO: 1385 - DNA, 21 bp, synthetic construct
  source 1..21: mol_type = other DNA
gcaattttccttctagttatg

SEQ ID NO: 1386 - DNA, 21 bp, synthetic construct
  source 1..21: mol_type = other DNA
caattttccttctagttatga

SEQ ID NO: 1387 - DNA, 21 bp, synthetic construct
  source 1..21: mol_type = other DNA
tccttctagttatgagccaga

SEQ ID NO: 1388 - DNA, 21 bp, synthetic construct
  source 1..21: mol_type = other DNA
ccttctagttatgagccagag

SEQ ID NO: 1389 - DNA, 21 bp, synthetic construct
  source 1..21: mol_type = other DNA
cttctagttatgagccagagt

SEQ ID NO: 1390 - DNA, 21 bp, synthetic construct
  source 1..21: mol_type = other DNA
tagttatgagccagagttatt

SEQ ID NO: 1391 - DNA, 21 bp, synthetic construct
  source 1..21: mol_type = other DNA
tgagccagagttatttcctgg

SEQ ID NO: 1392 - DNA, 21 bp, synthetic construct
  source 1..21: mol_type = other DNA
cctggtttaatctacagaatg

SEQ ID NO: 1393 - DNA, 21 bp, synthetic construct
  source 1..21: mol_type = other DNA
ctggtttaatctacagaatga

SEQ ID NO: 1394 - DNA, 21 bp, synthetic construct
  source 1..21: mol_type = other DNA
aatctacagaatgatcaaacc

SEQ ID NO: 1395 - DNA, 21 bp, synthetic construct
  source 1..21: mol_type = other DNA
atctacagaatgatcaaaccc

SEQ ID NO: 1396 - DNA, 21 bp, synthetic construct
  source 1..21: mol_type = other DNA
ttctccttatttttgtttctg

SEQ ID NO: 1397 - DNA, 21 bp, synthetic construct
  source 1..21: mol_type = other DNA
tccttatttttgtttctggaa

SEQ ID NO: 1398 - DNA, 21 bp, synthetic construct
  source 1..21: mol_type = other DNA
tttttgtttctggaaaagttg

SEQ ID NO: 1399 - DNA, 21 bp, synthetic construct
  source 1..21: mol_type = other DNA
ttgtttctggaaaagttgtat

SEQ ID NO: 1400 - DNA, 21 bp, synthetic construct
  source 1..21: mol_type = other DNA
tgtttctggaaaagttgtatt

SEQ ID NO: 1401 - DNA, 21 bp, synthetic construct
  source 1..21: mol_type = other DNA
gtttctggaaaagttgtatta

SEQ ID NO: 1402 - DNA, 21 bp, synthetic construct
  source 1..21: mol_type = other DNA
tttctggaaaagttgtattaa

SEQ ID NO: 1403 - DNA, 21 bp, synthetic construct
  source 1..21: mol_type = other DNA
ctggaaaagttgtattaacag

SEQ ID NO: 1404 - DNA, 21 bp, synthetic construct
  source 1..21: mol_type = other DNA
tggaaaagttgtattaacagg

SEQ ID NO: 1405 - DNA, 21 bp, synthetic construct
  source 1..21: mol_type = other DNA
tcttcttaggtgctaaagtca

SEQ ID NO: 1406 - DNA, 21 bp, synthetic construct
  source 1..21: mol_type = other DNA
ttaggtgctaaagtcagagca

SEQ ID NO: 1407 - DNA, 21 bp, synthetic construct
  source 1..21: mol_type = other DNA
ggtgctaaagtcagagcagaa

SEQ ID NO: 1408 - DNA, 21 bp, synthetic construct
  source 1..21: mol_type = other DNA
taaagggattcaggaagacga

SEQ ID NO: 1409 - DNA, 21 bp, synthetic construct
  source 1..21: mol_type = other DNA
ggtcaagtttacaaccaagat

SEQ ID NO: 1410 - DNA, 21 bp, synthetic construct
  source 1..21: mol_type = other DNA
aggtcaagtttacaaccaaga

SEQ ID NO: 1411 - DNA, 21 bp, synthetic construct
  source 1..21: mol_type = other DNA
gggcacgaagtgcaatggtct

SEQ ID NO: 1412 - DNA, 21 bp, synthetic construct
  source 1..21: mol_type = other DNA
cgggcacgaagtgcaatggtc

SEQ ID NO: 1413 - DNA, 21 bp, synthetic construct
  source 1..21: mol_type = other DNA
ggcgtttcgggcacgaagtgc

SEQ ID NO: 1414 - DNA, 21 bp, synthetic construct
  source 1..21: mol_type = other DNA
tattcggcgtttcgggcacga

SEQ ID NO: 1415 - DNA, 21 bp, synthetic construct
  source 1..21: mol_type = other DNA
ggattatattcggcgtttcgg

SEQ ID NO: 1416 - DNA, 21 bp, synthetic construct
  source 1..21: mol_type = other DNA
aaatagatctaaccttgggat

SEQ ID NO: 1417 - DNA, 21 bp, synthetic construct
  source 1..21: mol_type = other DNA
tcctcatgattaccgcagcaa

SEQ ID NO: 1418 - DNA, 21 bp, synthetic construct
  source 1..21: mol_type = other DNA
gtggctctcttatcctcatga

SEQ ID NO: 1419 - DNA, 21 bp, synthetic construct
  source 1..21: mol_type = other DNA
ccagaactgaaaatcagtgcc

SEQ ID NO: 1420 - DNA, 21 bp, synthetic construct
  source 1..21: mol_type = other DNA
cccagaactgaaaatcagtgc

SEQ ID NO: 1421 - DNA, 21 bp, synthetic construct
  source 1..21: mol_type = other DNA
tcccagaactgaaaatcagtg

SEQ ID NO: 1422 - DNA, 21 bp, synthetic construct
  source 1..21: mol_type = other DNA
gctcctgtgcacaccattttc

SEQ ID NO: 1423 - DNA, 21 bp, synthetic construct
  source 1..21: mol_type = other DNA
cggctacctcttggctcctgt

SEQ ID NO: 1424 - DNA, 21 bp, synthetic construct
  source 1..21: mol_type = other DNA
ttacggctacctcttggctcc

SEQ ID NO: 1425 - DNA, 21 bp, synthetic construct
  source 1..21: mol_type = other DNA
cttacggctacctcttggctc

SEQ ID NO: 1426 - DNA, 21 bp, synthetic construct
  source 1..21: mol_type = other DNA
ctgccagtctggactgttctt

SEQ ID NO: 1427 - DNA, 21 bp, synthetic construct
  source 1..21: mol_type = other DNA
ttgctgccagtctggactgtt

SEQ ID NO: 1428 - DNA, 21 bp, synthetic construct
  source 1..21: mol_type = other DNA
cttgctgccagtctggactgt

SEQ ID NO: 1429 - DNA, 21 bp, synthetic construct
  source 1..21: mol_type = other DNA
tcttgctgccagtctggactg

SEQ ID NO: 1430 - DNA, 21 bp, synthetic construct
  source 1..21: mol_type = other DNA
tgtacaactctagcatatttt

SEQ ID NO: 1431 - DNA, 21 bp, synthetic construct
  source 1..21: mol_type = other DNA
gctggaaaacccaacttctgt

SEQ ID NO: 1432 - DNA, 21 bp, synthetic construct
  source 1..21: mol_type = other DNA
aagtccaagaacttagctgga

SEQ ID NO: 1433 - DNA, 21 bp, synthetic construct
  source 1..21: mol_type = other DNA
tgaatcttgaagtccaagaac

SEQ ID NO: 1434 - DNA, 21 bp, synthetic construct
  source 1..21: mol_type = other DNA
acatcacagctccccaccata

SEQ ID NO: 1435 - DNA, 21 bp, synthetic construct
  source 1..21: mol_type = other DNA
taaccttataggaaacttcac

SEQ ID NO: 1436 - DNA, 21 bp, synthetic construct
  source 1..21: mol_type = other DNA
gtgggtgagcacaaggccttc

SEQ ID NO: 1437 - DNA, 21 bp, synthetic construct
  source 1..21: mol_type = other DNA
ttggtgggtgagcacaaggcc

SEQ ID NO: 1438 - DNA, 21 bp, synthetic construct
  source 1..21: mol_type = other DNA
cctactaaattgttggtgggt

SEQ ID NO: 1439 - DNA, 21 bp, synthetic construct
  source 1..21: mol_type = other DNA
agacttacctactaaattgtt

SEQ ID NO: 1440 - DNA, 21 bp, synthetic construct
  source 1..21: mol_type = other DNA
cagacttacctactaaattgt

SEQ ID NO: 1441 - DNA, 21 bp, synthetic construct
  source 1..21: mol_type = other DNA
aaccaggaaataactctggct

SEQ ID NO: 1442 - DNA, 21 bp, synthetic construct
  source 1..21: mol_type = other DNA
tgtagattaaaccaggaaata

SEQ ID NO: 1443 - DNA, 21 bp, synthetic construct
  source 1..21: mol_type = other DNA
atcattctgtagattaaacca

SEQ ID NO: 1444 - DNA, 21 bp, synthetic construct
  source 1..21: mol_type = other DNA
gatcattctgtagattaaacc

SEQ ID NO: 1445 - DNA, 21 bp, synthetic construct
  source 1..21: mol_type = other DNA
tgggtttgatcattctgtaga

SEQ ID NO: 1446 - DNA, 21 bp, synthetic construct
  source 1..21: mol_type = other DNA
cagaaacaaaaataaggagaa

SEQ ID NO: 1447 - DNA, 21 bp, synthetic construct
  source 1..21: mol_type = other DNA
ccagaaacaaaaataaggaga

SEQ ID NO: 1448 - DNA, 21 bp, synthetic construct
  source 1..21: mol_type = other DNA
tccagaaacaaaaataaggag

SEQ ID NO: 1449 - DNA, 21 bp, synthetic construct
  source 1..21: mol_type = other DNA
atacaacttttccagaaacaa

SEQ ID NO: 1450 - DNA, 21 bp, synthetic construct
  source 1..21: mol_type = other DNA
cctgttaatacaacttttcca

SEQ ID NO: 1451 - DNA, 21 bp, synthetic construct
  source 1..21: mol_type = other DNA
caacttacctgttaatacaac

SEQ ID NO: 1452 - DNA, 21 bp, synthetic construct
  source 1..21: mol_type = other DNA
ctgttacaacttacctgttaa

SEQ ID NO: 1453 - DNA, 21 bp, synthetic construct
  source 1..21: mol_type = other DNA
ataaatttctgctctgacttt

SEQ ID NO: 1454 - DNA, 21 bp, synthetic construct
  source 1..21: mol_type = other DNA
aaatgcttcataaatttctgc

SEQ ID NO: 1455 - DNA, 21 bp, synthetic construct
  source 1..21: mol_type = other DNA
caaatgcttcataaatttctg

SEQ ID NO: 1456 - DNA, 21 bp, synthetic construct
  source 1..21: mol_type = other DNA
tcaaatgcttcataaatttct

SEQ ID NO: 1457 - DNA, 21 bp, synthetic construct
  source 1..21: mol_type = other DNA
ctgaatccctttagaataggg

SEQ ID NO: 1458 - DNA, 21 bp, synthetic construct
  source 1..21: mol_type = other DNA
cgtcgtcttcctgaatccctt

SEQ ID NO: 1459 - DNA, 21 bp, synthetic construct
  source 1..21: mol_type = other DNA
gggggctatcattgtagtgag

SEQ ID NO: 1460 - DNA, 21 bp, synthetic construct
  source 1..21: mol_type = other DNA
ggggctatcattgtagtgagt

SEQ ID NO: 1461 - DNA, 21 bp, synthetic construct
  source 1..21: mol_type = other DNA
tagtgagtggcggccctggga

SEQ ID NO: 1462 - DNA, 21 bp, synthetic construct
  source 1..21: mol_type = other DNA
actcccactgggcccaacaac

SEQ ID NO: 1463 - DNA, 21 bp, synthetic construct
  source 1..21: mol_type = other DNA
tgccctgctggacagcagcag

SEQ ID NO: 1464 - DNA, 21 bp, synthetic construct
  source 1..21: mol_type = other DNA
gtccggacccaacccttctac

SEQ ID NO: 1465 - DNA, 21 bp, synthetic construct
  source 1..21: mol_type = other DNA
tacctcctttgagcccatcaa

SEQ ID NO: 1466 - DNA, 21 bp, synthetic construct
  source 1..21: mol_type = other DNA
gagcccatcaaggcagacccc

SEQ ID NO: 1467 - DNA, 21 bp, synthetic construct
  source 1..21: mol_type = other DNA
agcccatcaaggcagacccca

SEQ ID NO: 1468 - DNA, 21 bp, synthetic construct
  source 1..21: mol_type = other DNA
cttgtttttcagttttggaac

SEQ ID NO: 1469 - DNA, 21 bp, synthetic construct
  source 1..21: mol_type = other DNA
tttttcagttttggaactccc

SEQ ID NO: 1470 - DNA, 21 bp, synthetic construct
  source 1..21: mol_type = other DNA
ttcagttttggaactccccaa

SEQ ID NO: 1471 - DNA, 21 bp, synthetic construct
  source 1..21: mol_type = other DNA
tcagttttggaactccccaaa

SEQ ID NO: 1472 - DNA, 21 bp, synthetic construct
  source 1..21: mol_type = other DNA
cagttttggaactccccaaag

SEQ ID NO: 1473 - DNA, 21 bp, synthetic construct
  source 1..21: mol_type = other DNA
agttttggaactccccaaaga

SEQ ID NO: 1474 - DNA, 21 bp, synthetic construct
  source 1..21: mol_type = other DNA
tggaactccccaaagagctgt

SEQ ID NO: 1475 - DNA, 21 bp, synthetic construct
  source 1..21: mol_type = other DNA
ggaactccccaaagagctgtc

SEQ ID NO: 1476 - DNA, 21 bp, synthetic construct
  source 1..21: mol_type = other DNA
ccagagtgcatgagctcggag

SEQ ID NO: 1477 - DNA, 21 bp, synthetic construct
  source 1..21: mol_type = other DNA
gcccctctgcttcgtctttct

SEQ ID NO: 1478 - DNA, 21 bp, synthetic construct
  source 1..21: mol_type = other DNA
cccctctgcttcgtctttctc

SEQ ID NO: 1479 - DNA, 21 bp, synthetic construct
  source 1..21: mol_type = other DNA
gtctttctccacccccgggag

SEQ ID NO: 1480 - DNA, 21 bp, synthetic construct
  source 1..21: mol_type = other DNA
ctccacccccgggagaccacg

SEQ ID NO: 1481 - DNA, 21 bp, synthetic construct
  source 1..21: mol_type = other DNA
tccacccccgggagaccacga

SEQ ID NO: 1482 - DNA, 21 bp, synthetic construct
  source 1..21: mol_type = other DNA
tatctacaacctggacgagag

SEQ ID NO: 1483 - DNA, 21 bp, synthetic construct
  source 1..21: mol_type = other DNA
gatgtgcctgttctcaacctc

SEQ ID NO: 1484 - DNA, 21 bp, synthetic construct
  source 1..21: mol_type = other DNA
atgtgcctgttctcaacctct

SEQ ID NO: 1485 - DNA, 21 bp, synthetic construct
  source 1..21: mol_type = other DNA
tgcactgccagggacagcagt

SEQ ID NO: 1486 - DNA, 21 bp, synthetic construct
  source 1..21: mol_type = other DNA
cctggacttctgcactgccag

SEQ ID NO: 1487 - DNA, 21 bp, synthetic construct
  source 1..21: mol_type = other DNA
ctatcagtcccagggccgcca

SEQ ID NO: 1488 - DNA, 21 bp, synthetic construct
  source 1..21: mol_type = other DNA
ggcccagtgggagtgaactga

SEQ ID NO: 1489 - DNA, 21 bp, synthetic construct
  source 1..21: mol_type = other DNA
ttgggcccagtgggagtgaac

SEQ ID NO: 1490 - DNA, 21 bp, synthetic construct
  source 1..21: mol_type = other DNA
ggtccggacgaactgctgctg

SEQ ID NO: 1491 - DNA, 21 bp, synthetic construct
  source 1..21: mol_type = other DNA
atgggctcaaaggaggtagaa

SEQ ID NO: 1492 - DNA, 21 bp, synthetic construct
  source 1..21: mol_type = other DNA
tgacagctctttggggagttc

SEQ ID NO: 1493 - DNA, 21 bp, synthetic construct
  source 1..21: mol_type = other DNA
ctgacagctctttggggagtt

SEQ ID NO: 1494 - DNA, 21 bp, synthetic construct
  source 1..21: mol_type = other DNA
tgaggacatcaactcctccag

SEQ ID NO: 1495 - DNA, 21 bp, synthetic construct
  source 1..21: mol_type = other DNA
cagggccacccaccttctgag

SEQ ID NO: 1496 - DNA, 21 bp, synthetic construct
  source 1..21: mol_type = other DNA
tagatataatcgtggtctccc

SEQ ID NO: 1497 - DNA, 21 bp, synthetic construct
  source 1..21: mol_type = other DNA
actctcgtccaggttgtagat

SEQ ID NO: 1498 - DNA, 21 bp, synthetic construct
  source 1..21: mol_type = other DNA
tgggggttcacccacttgtag

SEQ ID NO: 1499 - DNA, 21 bp, synthetic construct
  source 1..21: mol_type = other DNA
acccacttgtaggtgccctca

SEQ ID NO: 1500 - DNA, 21 bp, synthetic construct
  source 1..21: mol_type = other DNA
taggtgccctcatactggaaa

SEQ ID NO: 1501 - DNA, 21 bp, synthetic construct
  source 1..21: mol_type = other DNA
atcagctcgtctgcctccgtg

SEQ ID NO: 1502 - DNA, 21 bp, synthetic construct
  source 1..21: mol_type = other DNA
cctcacctgccataaatatag

SEQ ID NO: 1503 - DNA, 21 bp, synthetic construct
  source 1..21: mol_type = other DNA
ctcacctgccataaatatagg

SEQ ID NO: 1504 - DNA, 21 bp, synthetic construct
  source 1..21: mol_type = other DNA
ggcttctccagctcaatctgg

SEQ ID NO: 1505 - DNA, 21 bp, synthetic construct
  source 1..21: mol_type = other DNA
tccagctcaatctggtgcagc

SEQ ID NO: 1506 - DNA, 21 bp, synthetic construct
  source 1..21: mol_type = other DNA
tctgtagggcaccttgtatct

SEQ ID NO: 1507 - DNA, 21 bp, synthetic construct
  source 1..21: mol_type = other DNA
tatctgttgccgtaggtcagg

SEQ ID NO: 1508 - DNA, 21 bp, synthetic construct
  source 1..21: mol_type = other DNA
ccgtaggtcaggtccagctcc

SEQ ID NO: 1509 - DNA, 21 bp, synthetic construct
  source 1..21: mol_type = other DNA
aagaacatgcccggcttcttg

SEQ ID NO: 1510 - DNA, 21 bp, synthetic construct
  source 1..21: mol_type = other DNA
ttggtcatcatcttggtgtac

SEQ ID NO: 1511 - DNA, 21 bp, synthetic construct
  source 1..21: mol_type = other DNA
gtcatcatcttggtgtacacg

SEQ ID NO: 1512 - DNA, 21 bp, synthetic construct
  source 1..21: mol_type = other DNA
gtgtacacggcctcgttgggc

SEQ ID NO: 1513 - DNA, 21 bp, synthetic construct
  source 1..21: mol_type = other DNA
ggctgcacgcggatcaccagc

SEQ ID NO: 1514 - DNA, 21 bp, synthetic construct
  source 1..21: mol_type = other DNA
cgcttgcactgctggtggaag

SEQ ID NO: 1515 - DNA, 21 bp, synthetic construct
  source 1..21: mol_type = other DNA
cactgctggtggaagatgtcg

SEQ ID NO: 1516 - DNA, 21 bp, synthetic construct
  source 1..21: mol_type = other DNA
cgctcgttcagggccttgccg

SEQ ID NO: 1517 - DNA, 21 bp, synthetic construct
  source 1..21: mol_type = other DNA
agggccttgccgcagcgcagg

SEQ ID NO: 1518 - DNA, 21 bp, synthetic construct
  source 1..21: mol_type = other DNA
ccgcagcgcaggatgaagggc

SEQ ID NO: 1519 - DNA, 21 bp, synthetic construct
  source 1..21: mol_type = other DNA
cagtatgagggcacctacaag

SEQ ID NO: 1520 - DNA, 21 bp, synthetic construct
  source 1..21: mol_type = other DNA
ccagtatgagggcacctacaa

SEQ ID NO: 1521 - DNA, 21 bp, synthetic construct
  source 1..21: mol_type = other DNA
agctggagaagcccaagccca

SEQ ID NO: 1522 - DNA, 21 bp, synthetic construct
  source 1..21: mol_type = other DNA
accccactgctgcaccagatt

SEQ ID NO: 1523 - DNA, 21 bp, synthetic construct
  source 1..21: mol_type = other DNA
caccccactgctgcaccagat

SEQ ID NO: 1524 - DNA, 21 bp, synthetic construct
  source 1..21: mol_type = other DNA
tcaccccactgctgcaccaga

SEQ ID NO: 1525 - DNA, 21 bp, synthetic construct
  source 1..21: mol_type = other DNA
tgcgggagccagatgcacttc

SEQ ID NO: 1526 - DNA, 21 bp, synthetic construct
  source 1..21: mol_type = other DNA
aaccccgaggagtcggagctg

SEQ ID NO: 1527 - DNA, 21 bp, synthetic construct
  source 1..21: mol_type = other DNA
ttcaaccccgaggagtcggag

SEQ ID NO: 1528 - DNA, 21 bp, synthetic construct
  source 1..21: mol_type = other DNA
caccagcagtgcaagcgcaac

SEQ ID NO: 1529 - DNA, 21 bp, synthetic construct
  source 1..21: mol_type = other DNA
catgatgtggccggcgacatc

SEQ ID NO: 1530 - DNA, 21 bp, synthetic construct
  source 1..21: mol_type = other DNA
atcctgcgctgcggcaaggcc

SEQ ID NO: 1531 - DNA, 21 bp, synthetic construct
  source 1..21: mol_type = other DNA
cgccacgtaggggtgcccttc

SEQ ID NO: 1532 - DNA, 21 bp, synthetic construct
  source 1..21: mol_type = other DNA
ccgccacgtaggggtgccctt

SEQ ID NO: 1533 - DNA, 21 bp, synthetic construct
  source 1..21: mol_type = other DNA
atgaagataaattgatagcac

SEQ ID NO: 1534 - DNA, 21 bp, synthetic construct
  source 1..21: mol_type = other DNA
atagcacaaaatctagaactt

SEQ ID NO: 1535 - DNA, 21 bp, synthetic construct
  source 1..21: mol_type = other DNA
atgaaaccataaaaattggtt

SEQ ID NO: 1536 - DNA, 21 bp, synthetic construct
  source 1..21: mol_type = other DNA
gtttgactaagcttaattgct

SEQ ID NO: 1537 - DNA, 21 bp, synthetic construct
  source 1..21: mol_type = other DNA
gactaagcttaattgctttct

SEQ ID NO: 1538 - DNA, 21 bp, synthetic construct
  source 1..21: mol_type = other DNA
actaagcttaattgctttctg

SEQ ID NO: 1539 - DNA, 21 bp, synthetic construct
  source 1..21: mol_type = other DNA
attgctttctggaacaggatc

SEQ ID NO: 1540 - DNA, 21 bp, synthetic construct
  source 1..21: mol_type = other DNA
ctttctggaacaggatctgaa

SEQ ID NO: 1541 - DNA, 21 bp, synthetic construct
  source 1..21: mol_type = other DNA
ctggaacaggatctgaaactg

SEQ ID NO: 1542 - DNA, 21 bp, synthetic construct
  source 1..21: mol_type = other DNA
tggaacaggatctgaaactgg

SEQ ID NO: 1543 - DNA, 21 bp, synthetic construct
  source 1..21: mol_type = other DNA
tctaatgtccgttaaaggtac

SEQ ID NO: 1544 - DNA, 21 bp, synthetic construct
  source 1..21: mol_type = other DNA
aaggtacgacaccacagagga

SEQ ID NO: 1545 - DNA, 21 bp, synthetic construct
  source 1..21: mol_type = other DNA
tttatacccatcaacactggt

SEQ ID NO: 1546 - DNA, 21 bp, synthetic construct
  source 1..21: mol_type = other DNA
atacccatcaacactggtaag

SEQ ID NO: 1547 - DNA, 21 bp, synthetic construct
  source 1..21: mol_type = other DNA
tacccatcaacactggtaaga

SEQ ID NO: 1548 - DNA, 21 bp, synthetic construct
  source 1..21: mol_type = other DNA
atcagctgaaaaggaaacagc

SEQ ID NO: 1549 - DNA, 21 bp, synthetic construct
  source 1..21: mol_type = other DNA
atgatgctaaactgttcagaa

SEQ ID NO: 1550 - DNA, 21 bp, synthetic construct
  source 1..21: mol_type = other DNA
agaaaacaacaaagaagagac

SEQ ID NO: 1551 - DNA, 21 bp, synthetic construct
  source 1..21: mol_type = other DNA
cttcttttaggatgtggatgt

SEQ ID NO: 1552 - DNA, 21 bp, synthetic construct
  source 1..21: mol_type = other DNA
ttcttttaggatgtggatgta

SEQ ID NO: 1553 - DNA, 21 bp, synthetic construct
  source 1..21: mol_type = other DNA
ttttaggatgtggatgtagaa

SEQ ID NO: 1554 - DNA, 21 bp, synthetic construct
  source 1..21: mol_type = other DNA
taggatgtggatgtagaagag

SEQ ID NO: 1555 - DNA, 21 bp, synthetic construct
  source 1..21: mol_type = other DNA
aggatgtggatgtagaagagg

SEQ ID NO: 1556 - DNA, 21 bp, synthetic construct
  source 1..21: mol_type = other DNA
ggatgtggatgtagaagaggc

SEQ ID NO: 1557 - DNA, 21 bp, synthetic construct
  source 1..21: mol_type = other DNA
tggggcagtatactgaagaac

SEQ ID NO: 1558 - DNA, 21 bp, synthetic construct
  source 1..21: mol_type = other DNA
ttcatcaattggcggggttcc

SEQ ID NO: 1559 - DNA, 21 bp, synthetic construct
  source 1..21: mol_type = other DNA
atcaattggcggggttccatt

SEQ ID NO: 1560 - DNA, 21 bp, synthetic construct
  source 1..21: mol_type = other DNA
gcggggttccatttttccagg

SEQ ID NO: 1561 - DNA, 21 bp, synthetic construct
  source 1..21: mol_type = other DNA
tcccgccttaaatccacagca

SEQ ID NO: 1562 - DNA, 21 bp, synthetic construct
  source 1..21: mol_type = other DNA
cccgccttaaatccacagcat

SEQ ID NO: 1563 - DNA, 21 bp, synthetic construct
  source 1..21: mol_type = other DNA
ccgccttaaatccacagcata

SEQ ID NO: 1564 - DNA, 21 bp, synthetic construct
  source 1..21: mol_type = other DNA
aatccacagcataaaaaatca

SEQ ID NO: 1565 - DNA, 21 bp, synthetic construct
  source 1..21: mol_type = other DNA
acacactggagaggtctaaag

SEQ ID NO: 1566 - DNA, 21 bp, synthetic construct
  source 1..21: mol_type = other DNA
gttacaaagagcagattacct

SEQ ID NO: 1567 - DNA, 21 bp, synthetic construct
  source 1..21: mol_type = other DNA
caaagagcagattacctctgc

SEQ ID NO: 1568 - DNA, 21 bp, synthetic construct
  source 1..21: mol_type = other DNA
cctctgcgagcccagatcaac

SEQ ID NO: 1569 - DNA, 21 bp, synthetic construct
  source 1..21: mol_type = other DNA
tagattttgtgctatcaattt

SEQ ID NO: 1570 - DNA, 21 bp, synthetic construct
  source 1..21: mol_type = other DNA
agttctagattttgtgctatc

SEQ ID NO: 1571 - DNA, 21 bp, synthetic construct
  source 1..21: mol_type = other DNA
attaagttctagattttgtgc

SEQ ID NO: 1572 - DNA, 21 bp, synthetic construct
  source 1..21: mol_type = other DNA
cattaagttctagattttgtg

SEQ ID NO: 1573 - DNA, 21 bp, synthetic construct
  source 1..21: mol_type = other DNA
tggtttcattaagttctagat

SEQ ID NO: 1574 - DNA, 21 bp, synthetic construct
  source 1..21: mol_type = other DNA
atggtttcattaagttctaga

SEQ ID NO: 1575 - DNA, 21 bp, synthetic construct
  source 1..21: mol_type = other DNA
tatggtttcattaagttctag

SEQ ID NO: 1576 - DNA, 21 bp, synthetic construct
  source 1..21: mol_type = other DNA
ttatggtttcattaagttcta

SEQ ID NO: 1577 - DNA, 21 bp, synthetic construct
  source 1..21: mol_type = other DNA
gtcaaaccaatttttatggtt

SEQ ID NO: 1578 - DNA, 21 bp, synthetic construct
  source 1..21: mol_type = other DNA
agcttagtcaaaccaattttt

SEQ ID NO: 1579 - DNA, 21 bp, synthetic construct
  source 1..21: mol_type = other DNA
cagaaagcaattaagcttagt

SEQ ID NO: 1580 - DNA, 21 bp, synthetic construct
  source 1..21: mol_type = other DNA
agatcctgttccagaaagcaa

SEQ ID NO: 1581 - DNA, 21 bp, synthetic construct
  source 1..21: mol_type = other DNA
cagatcctgttccagaaagca

SEQ ID NO: 1582 - DNA, 21 bp, synthetic construct
  source 1..21: mol_type = other DNA
ggatatccagtttcagatcct

SEQ ID NO: 1583 - DNA, 21 bp, synthetic construct
  source 1..21: mol_type = other DNA
aagtacctgttgggatatcca

SEQ ID NO: 1584 - DNA, 21 bp, synthetic construct
  source 1..21: mol_type = other DNA
aaagtacctgttgggatatcc

SEQ ID NO: 1585 - DNA, 21 bp, synthetic construct
  source 1..21: mol_type = other DNA
taaagtacctgttgggatatc

SEQ ID NO: 1586 - DNA, 21 bp, synthetic construct
  source 1..21: mol_type = other DNA
tcttttaaagtacctgttggg

SEQ ID NO: 1587 - DNA, 21 bp, synthetic construct
  source 1..21: mol_type = other DNA
ctcttttaaagtacctgttgg

SEQ ID NO: 1588 - DNA, 21 bp, synthetic construct
  source 1..21: mol_type = other DNA
tatttctcttttaaagtacct

SEQ ID NO: 1589 - DNA, 21 bp, synthetic construct
  source 1..21: mol_type = other DNA
atgggtataaataacttttcc

SEQ ID NO: 1590 - DNA, 21 bp, synthetic construct
  source 1..21: mol_type = other DNA
ccagtgttgatgggtataaat

SEQ ID NO: 1591 - DNA, 21 bp, synthetic construct
  source 1..21: mol_type = other DNA
ttaccagtgttgatgggtata

SEQ ID NO: 1592 - DNA, 21 bp, synthetic construct
  source 1..21: mol_type = other DNA
agttcttaccagtgttgatgg

SEQ ID NO: 1593 - DNA, 21 bp, synthetic construct
  source 1..21: mol_type = other DNA
acgtggttcagttcttaccag

SEQ ID NO: 1594 - DNA, 21 bp, synthetic construct
  source 1..21: mol_type = other DNA
agctgatcaaggagatgttca

SEQ ID NO: 1595 - DNA, 21 bp, synthetic construct
  source 1..21: mol_type = other DNA
cagctgatcaaggagatgttc

SEQ ID NO: 1596 - DNA, 21 bp, synthetic construct
  source 1..21: mol_type = other DNA
tcagctgatcaaggagatgtt

SEQ ID NO: 1597 - DNA, 21 bp, synthetic construct
  source 1..21: mol_type = other DNA
cttttcagctgatcaaggaga

SEQ ID NO: 1598 - DNA, 21 bp, synthetic construct
  source 1..21: mol_type = other DNA
ccttttcagctgatcaaggag

SEQ ID NO: 1599 - DNA, 21 bp, synthetic construct
  source 1..21: mol_type = other DNA
acagctcaggctgtttccttt

SEQ ID NO: 1600 - DNA, 21 bp, synthetic construct
  source 1..21: mol_type = other DNA
gcatcattaacagctcaggct

SEQ ID NO: 1601 - DNA, 21 bp, synthetic construct
  source 1..21: mol_type = other DNA
agcatcattaacagctcaggc

SEQ ID NO: 1602 - DNA, 21 bp, synthetic construct
  source 1..21: mol_type = other DNA
tgaacagtttagcatcattaa

SEQ ID NO: 1603 - DNA, 21 bp, synthetic construct
  source 1..21: mol_type = other DNA
ctgaacagtttagcatcatta

SEQ ID NO: 1604 - DNA, 21 bp, synthetic construct
  source 1..21: mol_type = other DNA
tctgaacagtttagcatcatt

SEQ ID NO: 1605 - DNA, 21 bp, synthetic construct
  source 1..21: mol_type = other DNA
ttttctgaacagtttagcatc

SEQ ID NO: 1606 - DNA, 21 bp, synthetic construct
  source 1..21: mol_type = other DNA
ttgttttctgaacagtttagc

SEQ ID NO: 1607 - DNA, 21 bp, synthetic construct
  source 1..21: mol_type = other DNA
tttgttgttttctgaacagtt

SEQ ID NO: 1608 - DNA, 21 bp, synthetic construct
  source 1..21: mol_type = other DNA
tctcttctttgttgttttctg

SEQ ID NO: 1609 - DNA, 21 bp, synthetic construct
  source 1..21: mol_type = other DNA
ccggaattgtctcttctttgt

SEQ ID NO: 1610 - DNA, 21 bp, synthetic construct
  source 1..21: mol_type = other DNA
accggaattgtctcttctttg

SEQ ID NO: 1611 - DNA, 21 bp, synthetic construct
  source 1..21: mol_type = other DNA
aatttaccggaattgtctctt

SEQ ID NO: 1612 - DNA, 21 bp, synthetic construct
  source 1..21: mol_type = other DNA
aaatttaccggaattgtctct

SEQ ID NO: 1613 - DNA, 21 bp, synthetic construct
  source 1..21: mol_type = other DNA
agtatactgccccagaactgc

SEQ ID NO: 1614 - DNA, 21 bp, synthetic construct
  source 1..21: mol_type = other DNA
ttcagtatactgccccagaac

SEQ ID NO: 1615 - DNA, 21 bp, synthetic construct
  source 1..21: mol_type = other DNA
gaggttcttcagtatactgcc

SEQ ID NO: 1616 - DNA, 21 bp, synthetic construct
  source 1..21: mol_type = other DNA
acttagaggttcttcagtata

SEQ ID NO: 1617 - DNA, 21 bp, synthetic construct
  source 1..21: mol_type = other DNA
atgaacaatccacaccagcat

SEQ ID NO: 1618 - DNA, 21 bp, synthetic construct
  source 1..21: mol_type = other DNA
tctgatatgacatacctggaa

SEQ ID NO: 1619 - DNA, 21 bp, synthetic construct
  source 1..21: mol_type = other DNA
tcttttccatgtgatttttta

SEQ ID NO: 1620 - DNA, 21 bp, synthetic construct
  source 1..21: mol_type = other DNA
gtcttttccatgtgatttttt

SEQ ID NO: 1621 - DNA, 21 bp, synthetic construct
  source 1..21: mol_type = other DNA
tttgtcttttccatgtgattt

SEQ ID NO: 1622 - DNA, 21 bp, synthetic construct
  source 1..21: mol_type = other DNA
ctttgtcttttccatgtgatt

SEQ ID NO: 1623 - DNA, 21 bp, synthetic construct
  source 1..21: mol_type = other DNA
tctttgtcttttccatgtgat

SEQ ID NO: 1624 - DNA, 21 bp, synthetic construct
  source 1..21: mol_type = other DNA
atgcctctgttttctttgtct

SEQ ID NO: 1625 - DNA, 21 bp, synthetic construct
  source 1..21: mol_type = other DNA
gacctctccagtgtgttaatg

SEQ ID NO: 1626 - DNA, 21 bp, synthetic construct
  source 1..21: mol_type = other DNA
agacctctccagtgtgttaat

SEQ ID NO: 1627 - DNA, 21 bp, synthetic construct
  source 1..21: mol_type = other DNA
cactttagacctctccagtgt

SEQ ID NO: 1628 - DNA, 21 bp, synthetic construct
  source 1..21: mol_type = other DNA
ttccactttagacctctccag

SEQ ID NO: 1629 - DNA, 21 bp, synthetic construct
  source 1..21: mol_type = other DNA
cttccactttagacctctcca

SEQ ID NO: 1630 - DNA, 21 bp, synthetic construct
  source 1..21: mol_type = other DNA
taaccaagtgctctgtagttt

SEQ ID NO: 1631 - DNA, 21 bp, synthetic construct
  source 1..21: mol_type = other DNA
gtaaccaagtgctctgtagtt

SEQ ID NO: 1632 - DNA, 21 bp, synthetic construct
  source 1..21: mol_type = other DNA
atctgggctcgcagaggtaat

SEQ ID NO: 1633 - DNA, 21 bp, synthetic construct
  source 1..21: mol_type = other DNA
aaggttgatctgggctcgcag

SEQ ID NO: 1634 - DNA, 21 bp, synthetic construct
  source 1..21: mol_type = other DNA
ccaacccccaagtgaattaaa

SEQ ID NO: 1635 - DNA, 20 bp, synthetic construct
  source 1..20: mol_type = other DNA
tctaggtatgacaacgaatt

SEQ ID NO: 1636 - DNA, 20 bp, synthetic construct
  source 1..20: mol_type = other DNA
agccccagcgtcaaaggtgg

SEQ ID NO: 1637 - DNA, 20 bp, synthetic construct
  source 1..20: mol_type = other DNA
attgtatccacagtgaatct

SEQ ID NO: 1638 - DNA, 20 bp, synthetic construct
  source 1..20: mol_type = other DNA
aaacgccgaatataatccca

SEQ ID NO: 1639 - DNA, 20 bp, synthetic construct
  source 1..20: mol_type = other DNA
accattgtagcggtttgctg

SEQ ID NO: 1640 - DNA, 20 bp, synthetic construct
  source 1..20: mol_type = other DNA
ggtttgctgcggtaatcatg

SEQ ID NO: 1641 - DNA, 20 bp, synthetic construct
  source 1..20: mol_type = other DNA
gataagagagccacgaacca

SEQ ID NO: 1642 - DNA, 20 bp, synthetic construct
  source 1..20: mol_type = other DNA
acggcactgattttcagttc

SEQ ID NO: 1643 - DNA, 20 bp, synthetic construct
  source 1..20: mol_type = other DNA
cggcactgattttcagttct

SEQ ID NO: 1644 - DNA, 20 bp, synthetic construct
  source 1..20: mol_type = other DNA
gattttcagttctgggaaaa

SEQ ID NO: 1645 - DNA, 20 bp, synthetic construct
  source 1..20: mol_type = other DNA
tctgggaaaatggtgtgcac

SEQ ID NO: 1646 - DNA, 20 bp, synthetic construct
  source 1..20: mol_type = other DNA
tggtgtgcacaggagccaag

SEQ ID NO: 1647 - DNA, 20 bp, synthetic construct
  source 1..20: mol_type = other DNA
tagtgaagaacagtccagac

SEQ ID NO: 1648 - DNA, 20 bp, synthetic construct
  source 1..20: mol_type = other DNA
tgctagagttgtacagaagt

SEQ ID NO: 1649 - DNA, 20 bp, synthetic construct
  source 1..20: mol_type = other DNA
gctagagttgtacagaagtt

SEQ ID NO: 1650 - DNA, 20 bp, synthetic construct
  source 1..20: mol_type = other DNA
gggttttccagctaagttct

SEQ ID NO: 1651 - DNA, 20 bp, synthetic construct
  source 1..20: mol_type = other DNA
ggacttcaagattcagaata

SEQ ID NO: 1652 - DNA, 20 bp, synthetic construct
  source 1..20: mol_type = other DNA
cttcaagattcagaatatgg

SEQ ID NO: 1653 - DNA, 20 bp, synthetic construct
  source 1..20: mol_type = other DNA
ttcaagattcagaatatggt

SEQ ID NO: 1654 - DNA, 20 bp, synthetic construct
  source 1..20: mol_type = other DNA
tcaagattcagaatatggtg

SEQ ID NO: 1655 - DNA, 20 bp, synthetic construct
  source 1..20: mol_type = other DNA
gtgatgtgaagtttcctata

SEQ ID NO: 1656 - DNA, 20 bp, synthetic construct
  source 1..20: mol_type = other DNA
aagtttcctataaggttaga

SEQ ID NO: 1657 - DNA, 20 bp, synthetic construct
  source 1..20: mol_type = other DNA
tcacccaccaacaatttagt

SEQ ID NO: 1658 - DNA, 20 bp, synthetic construct
  source 1..20: mol_type = other DNA
tatgagccagagttatttcc

SEQ ID NO: 1659 - DNA, 20 bp, synthetic construct
  source 1..20: mol_type = other DNA
gttctccttatttttgtttc

SEQ ID NO: 1660 - DNA, 20 bp, synthetic construct
  source 1..20: mol_type = other DNA
tctggaaaagttgtattaac

SEQ ID NO: 1661 - DNA, 20 bp, synthetic construct
  source 1..20: mol_type = other DNA
aaacatctaccctattctaa

SEQ ID NO: 1662 - DNA, 20 bp, synthetic construct
  source 1..20: mol_type = other DNA
accctattctaaagggattc

SEQ ID NO: 1663 - DNA, 20 bp, synthetic construct
  source 1..20: mol_type = other DNA
gattcaggaagacgacgtaa

SEQ ID NO: 1664 - DNA, 20 bp, synthetic construct
  source 1..20: mol_type = other DNA
cacgaagtgcaatggtcttt

SEQ ID NO: 1665 - DNA, 20 bp, synthetic construct
  source 1..20: mol_type = other DNA
gtttcgggcacgaagtgcaa

SEQ ID NO: 1666 - DNA, 20 bp, synthetic construct
  source 1..20: mol_type = other DNA
gggattatattcggcgtttc

SEQ ID NO: 1667 - DNA, 20 bp, synthetic construct
  source 1..20: mol_type = other DNA
tgggattatattcggcgttt

SEQ ID NO: 1668 - DNA, 20 bp, synthetic construct
  source 1..20: mol_type = other DNA
tctaaccttgggattatatt

SEQ ID NO: 1669 - DNA, 20 bp, synthetic construct
  source 1..20: mol_type = other DNA
attaaaatagatctaacctt

SEQ ID NO: 1670 - DNA, 20 bp, synthetic construct
  source 1..20: mol_type = other DNA
aaaatcagtgccgtggttcg

SEQ ID NO: 1671 - DNA, 20 bp, synthetic construct
  source 1..20: mol_type = other DNA
agaactgaaaatcagtgccg

SEQ ID NO: 1672 - DNA, 20 bp, synthetic construct
  source 1..20: mol_type = other DNA
aatttcttacggctacctct

SEQ ID NO: 1673 - DNA, 20 bp, synthetic construct
  source 1..20: mol_type = other DNA
agtctggactgttcttcact

SEQ ID NO: 1674 - DNA, 20 bp, synthetic construct
  source 1..20: mol_type = other DNA
atattttcttgctgccagtc

SEQ ID NO: 1675 - DNA, 20 bp, synthetic construct
  source 1..20: mol_type = other DNA
ttgaagtccaagaacttagc

SEQ ID NO: 1676 - DNA, 20 bp, synthetic construct
  source 1..20: mol_type = other DNA
acaaggccttctaaccttat

SEQ ID NO: 1677 - DNA, 20 bp, synthetic construct
  source 1..20: mol_type = other DNA
attgttggtgggtgagcaca

SEQ ID NO: 1678 - DNA, 20 bp, synthetic construct
  source 1..20: mol_type = other DNA
ttacctactaaattgttggt

SEQ ID NO: 1679 - DNA, 20 bp, synthetic construct
  source 1..20: mol_type = other DNA
cttacctactaaattgttgg

SEQ ID NO: 1680 - DNA, 20 bp, synthetic construct
  source 1..20: mol_type = other DNA
agacttacctactaaattgt

SEQ ID NO: 1681 - DNA, 20 bp, synthetic construct
  source 1..20: mol_type = other DNA
attaaaccaggaaataactc

SEQ ID NO: 1682 - DNA, 20 bp, synthetic construct
  source 1..20: mol_type = other DNA
atcattctgtagattaaacc

SEQ ID NO: 1683 - DNA, 20 bp, synthetic construct
  source 1..20: mol_type = other DNA
aaaataaggagaacaattct

SEQ ID NO: 1684 - DNA, 20 bp, synthetic construct
  source 1..20: mol_type = other DNA
cttttccagaaacaaaaata

SEQ ID NO: 1685 - DNA, 20 bp, synthetic construct
  source 1..20: mol_type = other DNA
tcctgaatccctttagaata

SEQ ID NO: 1686 - DNA, 20 bp, synthetic construct
  source 1..20: mol_type = other DNA
ttcctgaatccctttagaat

SEQ ID NO: 1687 - DNA, 20 bp, synthetic construct
  source 1..20: mol_type = other DNA
ctcactcccactgctgtccc

SEQ ID NO: 1688 - DNA, 20 bp, synthetic construct
  source 1..20: mol_type = other DNA
ccctggcagtgcagaagtcc

SEQ ID NO: 1689 - DNA, 20 bp, synthetic construct
  source 1..20: mol_type = other DNA
cctggcagtgcagaagtcca

SEQ ID NO: 1690 - DNA, 20 bp, synthetic construct
  source 1..20: mol_type = other DNA
cagtgcagaagtccagggaa

SEQ ID NO: 1691 - DNA, 20 bp, synthetic construct
  source 1..20: mol_type = other DNA
gcagaagtccagggaatggc

SEQ ID NO: 1692 - DNA, 20 bp, synthetic construct
  source 1..20: mol_type = other DNA
ggcccagcagctgagatcac

SEQ ID NO: 1693 - DNA, 20 bp, synthetic construct
  source 1..20: mol_type = other DNA
ggggctatcattgtagtgag

SEQ ID NO: 1694 - DNA, 20 bp, synthetic construct
  source 1..20: mol_type = other DNA
gctatcattgtagtgagtgg

SEQ ID NO: 1695 - DNA, 20 bp, synthetic construct
  source 1..20: mol_type = other DNA
attgtagtgagtggcggccc

SEQ ID NO: 1696 - DNA, 20 bp, synthetic construct
  source 1..20: mol_type = other DNA
ttgtagtgagtggcggccct

SEQ ID NO: 1697 - DNA, 20 bp, synthetic construct
  source 1..20: mol_type = other DNA
cggccctgggactgatagca

SEQ ID NO: 1698 - DNA, 20 bp, synthetic construct
  source 1..20: mol_type = other DNA
gggactgatagcaaggacag

SEQ ID NO: 1699 - DNA, 20 bp, synthetic construct
  source 1..20: mol_type = other DNA
tgagctcagttcactcccac

SEQ ID NO: 1700 - DNA, 20 bp, synthetic construct
  source 1..20: mol_type = other DNA
gagctcagttcactcccact

SEQ ID NO: 1701 - DNA, 20 bp, synthetic construct
  source 1..20: mol_type = other DNA
cccactgggcccaacaacac

SEQ ID NO: 1702 - DNA, 20 bp, synthetic construct
  source 1..20: mol_type = other DNA
gcccaacaacactggacacc

SEQ ID NO: 1703 - DNA, 20 bp, synthetic construct
  source 1..20: mol_type = other DNA
actgcagtcttctgccctgc

SEQ ID NO: 1704 - DNA, 20 bp, synthetic construct
  source 1..20: mol_type = other DNA
agtaacagcagcagttcgtc

SEQ ID NO: 1705 - DNA, 20 bp, synthetic construct
  source 1..20: mol_type = other DNA
tacctcctttgagcccatca

SEQ ID NO: 1706 - DNA, 20 bp, synthetic construct
  source 1..20: mol_type = other DNA
cccatcaaggcagaccccac

SEQ ID NO: 1707 - DNA, 20 bp, synthetic construct
  source 1..20: mol_type = other DNA
atcaaggcagaccccacagg

SEQ ID NO: 1708 - DNA, 20 bp, synthetic construct
  source 1..20: mol_type = other DNA
gaaatctttgatcccacacg

SEQ ID NO: 1709 - DNA, 20 bp, synthetic construct
  source 1..20: mol_type = other DNA
tctttgatcccacacgaggt

SEQ ID NO: 1710 - DNA, 20 bp, synthetic construct
  source 1..20: mol_type = other DNA
attcccagagtgcatgagct

SEQ ID NO: 1711 - DNA, 20 bp, synthetic construct
  source 1..20: mol_type = other DNA
gtgcatgagctcggagctgc

SEQ ID NO: 1712 - DNA, 20 bp, synthetic construct
  source 1..20: mol_type = other DNA
gaggagttgatgtcctcaga

SEQ ID NO: 1713 - DNA, 20 bp, synthetic construct
  source 1..20: mol_type = other DNA
gagttgatgtcctcagaagg

SEQ ID NO: 1714 - DNA, 20 bp, synthetic construct
  source 1..20: mol_type = other DNA
agttgatgtcctcagaaggt

SEQ ID NO: 1715 - DNA, 20 bp, synthetic construct
  source 1..20: mol_type = other DNA
gcttcgtctttctccacccc

SEQ ID NO: 1716 - DNA, 20 bp, synthetic construct
  source 1..20: mol_type = other DNA
cttcgtctttctccaccccc

SEQ ID NO: 1717 - DNA, 20 bp, synthetic construct
  source 1..20: mol_type = other DNA
ccacgattatatctacaacc

SEQ ID NO: 1718 - DNA, 20 bp, synthetic construct
  source 1..20: mol_type = other DNA
tacaacctggacgagagtga

SEQ ID NO: 1719 - DNA, 20 bp, synthetic construct
  source 1..20: mol_type = other DNA
gcactgccagggacagcagt

SEQ ID NO: 1720 - DNA, 20 bp, synthetic construct
  source 1..20: mol_type = other DNA
tgcactgccagggacagcag

SEQ ID NO: 1721 - DNA, 20 bp, synthetic construct
  source 1..20: mol_type = other DNA
cctggacttctgcactgcca

SEQ ID NO: 1722 - DNA, 20 bp, synthetic construct
  source 1..20: mol_type = other DNA
ccctggacttctgcactgcc

SEQ ID NO: 1723 - DNA, 20 bp, synthetic construct
  source 1..20: mol_type = other DNA
ctgctgggccagccattccc

SEQ ID NO: 1724 - DNA, 20 bp, synthetic construct
  source 1..20: mol_type = other DNA
tgtccttgctatcagtccca

SEQ ID NO: 1725 - DNA, 20 bp, synthetic construct
  source 1..20: mol_type = other DNA
ctgtccttgctatcagtccc

SEQ ID NO: 1726 - DNA, 20 bp, synthetic construct
  source 1..20: mol_type = other DNA
ccagtgttgttgggcccagt

SEQ ID NO: 1727 - DNA, 20 bp, synthetic construct
  source 1..20: mol_type = other DNA
tccagtgttgttgggcccag

SEQ ID NO: 1728 - DNA, 20 bp, synthetic construct
  source 1..20: mol_type = other DNA
gccgggtgtccagtgttgtt

SEQ ID NO: 1729 - DNA, 20 bp, synthetic construct
  source 1..20: mol_type = other DNA
ggccgggtgtccagtgttgt

SEQ ID NO: 1730 - DNA, 20 bp, synthetic construct
  source 1..20: mol_type = other DNA
agcagggcagaagactgcag

SEQ ID NO: 1731 - DNA, 20 bp, synthetic construct
  source 1..20: mol_type = other DNA
gctgctgctgctgtccagca

SEQ ID NO: 1732 - DNA, 20 bp, synthetic construct
  source 1..20: mol_type = other DNA
ggaggtagaagggttgggtc

SEQ ID NO: 1733 - DNA, 20 bp, synthetic construct
  source 1..20: mol_type = other DNA
tgggctcaaaggaggtagaa

SEQ ID NO: 1734 - DNA, 20 bp, synthetic construct
  source 1..20: mol_type = other DNA
atgggctcaaaggaggtaga

SEQ ID NO: 1735 - DNA, 20 bp, synthetic construct
  source 1..20: mol_type = other DNA
tgccttgatgggctcaaagg

SEQ ID NO: 1736 - DNA, 20 bp, synthetic construct
  source 1..20: mol_type = other DNA
gtctgccttgatgggctcaa

SEQ ID NO: 1737 - DNA, 20 bp, synthetic construct
  source 1..20: mol_type = other DNA
cctgtggggtctgccttgat

SEQ ID NO: 1738 - DNA, 20 bp, synthetic construct
  source 1..20: mol_type = other DNA
acctgtggggtctgccttga

SEQ ID NO: 1739 - DNA, 20 bp, synthetic construct
  source 1..20: mol_type = other DNA
gcaggtactcaccacctgtg

SEQ ID NO: 1740 - DNA, 20 bp, synthetic construct
  source 1..20: mol_type = other DNA
ggcaggtactcaccacctgt

SEQ ID NO: 1741 - DNA, 20 bp, synthetic construct
  source 1..20: mol_type = other DNA
gggcaggtactcaccacctg

SEQ ID NO: 1742 - DNA, 20 bp, synthetic construct
  source 1..20: mol_type = other DNA
agatttctgacagctctttg

SEQ ID NO: 1743 - DNA, 20 bp, synthetic construct
  source 1..20: mol_type = other DNA
aagatttctgacagctcttt

SEQ ID NO: 1744 - DNA, 20 bp, synthetic construct
  source 1..20: mol_type = other DNA
aaagatttctgacagctctt

SEQ ID NO: 1745 - DNA, 20 bp, synthetic construct
  source 1..20: mol_type = other DNA
tgcagcagcctacctcgtgt

SEQ ID NO: 1746 - DNA, 20 bp, synthetic construct
  source 1..20: mol_type = other DNA
atgcagcagcctacctcgtg

SEQ ID NO: 1747 - DNA, 20 bp, synthetic construct
  source 1..20: mol_type = other DNA
gctccgagctcatgcactct

SEQ ID NO: 1748 - DNA, 20 bp, synthetic construct
  source 1..20: mol_type = other DNA
agctccgagctcatgcactc

SEQ ID NO: 1749 - DNA, 20 bp, synthetic construct
  source 1..20: mol_type = other DNA
ccagggccacccaccttctg

SEQ ID NO: 1750 - DNA, 20 bp, synthetic construct
  source 1..20: mol_type = other DNA
tggagaaagacgaagcagag

SEQ ID NO: 1751 - DNA, 20 bp, synthetic construct
  source 1..20: mol_type = other DNA
gtggagaaagacgaagcaga

SEQ ID NO: 1752 - DNA, 20 bp, synthetic construct
  source 1..20: mol_type = other DNA
ggtggagaaagacgaagcag

SEQ ID NO: 1753 - DNA, 20 bp, synthetic construct
  source 1..20: mol_type = other DNA
taatcgtggtctcccggggg

SEQ ID NO: 1754 - DNA, 20 bp, synthetic construct
  source 1..20: mol_type = other DNA
atataatcgtggtctcccgg

SEQ ID NO: 1755 - DNA, 20 bp, synthetic construct
  source 1..20: mol_type = other DNA
gatataatcgtggtctcccg

SEQ ID NO: 1756 - DNA, 20 bp, synthetic construct
  source 1..20: mol_type = other DNA
agatataatcgtggtctccc

SEQ ID NO: 1757 - DNA, 20 bp, synthetic construct
  source 1..20: mol_type = other DNA
tagatataatcgtggtctcc

SEQ ID NO: 1758 - DNA, 20 bp, synthetic construct
  source 1..20: mol_type = other DNA
ccaggttgtagatataatcg

SEQ ID NO: 1759 - DNA, 20 bp, synthetic construct
  source 1..20: mol_type = other DNA
agacaccttcactctcgtcc

SEQ ID NO: 1760 - DNA, 20 bp, synthetic construct
  source 1..20: mol_type = other DNA
tgagaacaggcacatcaaag

SEQ ID NO: 1761 - DNA, 20 bp, synthetic construct
  source 1..20: mol_type = other DNA
gtgggggttcacccacttgt

SEQ ID NO: 1762 - DNA, 20 bp, synthetic construct
  source 1..20: mol_type = other DNA
acttgtaggtgccctcatac

SEQ ID NO: 1763 - DNA, 20 bp, synthetic construct
  source 1..20: mol_type = other DNA
catcagctcgtctgcctccg

SEQ ID NO: 1764 - DNA, 20 bp, synthetic construct
  source 1..20: mol_type = other DNA
atcagctcgtctgcctccgt

SEQ ID NO: 1765 - DNA, 20 bp, synthetic construct
  source 1..20: mol_type = other DNA
tcagctcgtctgcctccgtg

SEQ ID NO: 1766 - DNA, 20 bp, synthetic construct
  source 1..20: mol_type = other DNA
cgtctgcctccgtggggcct

SEQ ID NO: 1767 - DNA, 20 bp, synthetic construct
  source 1..20: mol_type = other DNA
tgcctccgtggggcctcggc

SEQ ID NO: 1768 - DNA, 20 bp, synthetic construct
  source 1..20: mol_type = other DNA
tcctcacctgccataaatat

SEQ ID NO: 1769 - DNA, 20 bp, synthetic construct
  source 1..20: mol_type = other DNA
cctcacctgccataaatata

SEQ ID NO: 1770 - DNA, 20 bp, synthetic construct
  source 1..20: mol_type = other DNA
ctcacctgccataaatatag

SEQ ID NO: 1771 - DNA, 20 bp, synthetic construct
  source 1..20: mol_type = other DNA
cctgccataaatatagggga

SEQ ID NO: 1772 - DNA, 20 bp, synthetic construct
  source 1..20: mol_type = other DNA
ctgccataaatataggggat

SEQ ID NO: 1773 - DNA, 20 bp, synthetic construct
  source 1..20: mol_type = other DNA
ataaatataggggatgggct

SEQ ID NO: 1774 - DNA, 20 bp, synthetic construct
  source 1..20: mol_type = other DNA
taaatataggggatgggctt

SEQ ID NO: 1775 - DNA, 20 bp, synthetic construct
  source 1..20: mol_type = other DNA
tgggcttctccagctcaatc

SEQ ID NO: 1776 - DNA, 20 bp, synthetic construct
  source 1..20: mol_type = other DNA
agctcaatctggtgcagcag

SEQ ID NO: 1777 - DNA, 20 bp, synthetic construct
  source 1..20: mol_type = other DNA
gctcaatctggtgcagcagt

SEQ ID NO: 1778 - DNA, 20 bp, synthetic construct
  source 1..20: mol_type = other DNA
ctcaatctggtgcagcagtg

SEQ ID NO: 1779 - DNA, 20 bp, synthetic construct
  source 1..20: mol_type = other DNA
cagtggggtgaaaatacgcc

SEQ ID NO: 1780 - DNA, 20 bp, synthetic construct
  source 1..20: mol_type = other DNA
tgaaaatacgccaggcctca

SEQ ID NO: 1781 - DNA, 20 bp, synthetic construct
  source 1..20: mol_type = other DNA
cctcacggagctcgtcgctg

SEQ ID NO: 1782 - DNA, 20 bp, synthetic construct
  source 1..20: mol_type = other DNA
acctgcgcacgaagtgcatc

SEQ ID NO: 1783 - DNA, 20 bp, synthetic construct
  source 1..20: mol_type = other DNA
ggctcccgcagaagacgtcc

SEQ ID NO: 1784 - DNA, 20 bp, synthetic construct
  source 1..20: mol_type = other DNA
cgcagaagacgtccaggatg

SEQ ID NO: 1785 - DNA, 20 bp, synthetic construct
  source 1..20: mol_type = other DNA
gtccaggatgaggcgctcat

SEQ ID NO: 1786 - DNA, 20 bp, synthetic construct
  source 1..20: mol_type = other DNA
atgaggcgctcataggcgtc

SEQ ID NO: 1787 - DNA, 20 bp, synthetic construct
  source 1..20: mol_type = other DNA
tgaggcgctcataggcgtca

SEQ ID NO: 1788 - DNA, 20 bp, synthetic construct
  source 1..20: mol_type = other DNA
caccttgtatctgttgccgt

SEQ ID NO: 1789 - DNA, 20 bp, synthetic construct
  source 1..20: mol_type = other DNA
tgtatctgttgccgtaggtc

SEQ ID NO: 1790 - DNA, 20 bp, synthetic construct
  source 1..20: mol_type = other DNA
caggtccagctccgactcct

SEQ ID NO: 1791 - DNA, 20 bp, synthetic construct
  source 1..20: mol_type = other DNA
aggtccagctccgactcctc

SEQ ID NO: 1792 - DNA, 20 bp, synthetic construct
  source 1..20: mol_type = other DNA
ggtccagctccgactcctcg

SEQ ID NO: 1793 - DNA, 20 bp, synthetic construct
  source 1..20: mol_type = other DNA
tcggggttgaagaacatgcc

SEQ ID NO: 1794 - DNA, 20 bp, synthetic construct
  source 1..20: mol_type = other DNA
gaagaacatgcccggcttct

SEQ ID NO: 1795 - DNA, 20 bp, synthetic construct
  source 1..20: mol_type = other DNA
cggcttcttggtcatcatct

SEQ ID NO: 1796 - DNA, 20 bp, synthetic construct
  source 1..20: mol_type = other DNA
ggtcatcatcttggtgtaca

SEQ ID NO: 1797 - DNA, 20 bp, synthetic construct
  source 1..20: mol_type = other DNA
cttggtgtacacggcctcgt

SEQ ID NO: 1798 - DNA, 20 bp, synthetic construct
  source 1..20: mol_type = other DNA
ttggtgtacacggcctcgtt

SEQ ID NO: 1799 - DNA, 20 bp, synthetic construct
  source 1..20: mol_type = other DNA
cggcctcgttgggctgcacg

SEQ ID NO: 1800 - DNA, 20 bp, synthetic construct
  source 1..20: mol_type = other DNA
gctcgttgcgcttgcactgc

SEQ ID NO: 1801 - DNA, 20 bp, synthetic construct
  source 1..20: mol_type = other DNA
cgttgcgcttgcactgctgg

SEQ ID NO: 1802 - DNA, 20 bp, synthetic construct
  source 1..20: mol_type = other DNA
ctgctggtggaagatgtcgc

SEQ ID NO: 1803 - DNA, 20 bp, synthetic construct
  source 1..20: mol_type = other DNA
agatgtcgccggccacatca

SEQ ID NO: 1804 - DNA, 20 bp, synthetic construct
  source 1..20: mol_type = other DNA
atggaactgcagcctcacct

SEQ ID NO: 1805 - DNA, 20 bp, synthetic construct
  source 1..20: mol_type = other DNA
cctcggccttgcgctcgttc

SEQ ID NO: 1806 - DNA, 20 bp, synthetic construct
  source 1..20: mol_type = other DNA
ctcggccttgcgctcgttca

SEQ ID NO: 1807 - DNA, 20 bp, synthetic construct
  source 1..20: mol_type = other DNA
tcagggccttgccgcagcgc

SEQ ID NO: 1808 - DNA, 20 bp, synthetic construct
  source 1..20: mol_type = other DNA
cttgccgcagcgcaggatga

SEQ ID NO: 1809 - DNA, 20 bp, synthetic construct
  source 1..20: mol_type = other DNA
ttgccgcagcgcaggatgaa

SEQ ID NO: 1810 - DNA, 20 bp, synthetic construct
  source 1..20: mol_type = other DNA
gtatgagggcacctacaagt

SEQ ID NO: 1811 - DNA, 20 bp, synthetic construct
  source 1..20: mol_type = other DNA
agtatgagggcacctacaag

SEQ ID NO: 1812 - DNA, 20 bp, synthetic construct
  source 1..20: mol_type = other DNA
agagtgggtttccagtatga

SEQ ID NO: 1813 - DNA, 20 bp, synthetic construct
  source 1..20: mol_type = other DNA
gagagtgggtttccagtatg

SEQ ID NO: 1814 - DNA, 20 bp, synthetic construct
  source 1..20: mol_type = other DNA
gacgagctgatgaagagagt

SEQ ID NO: 1815 - DNA, 20 bp, synthetic construct
  source 1..20: mol_type = other DNA
agacgagctgatgaagagag

SEQ ID NO: 1816 - DNA, 20 bp, synthetic construct
  source 1..20: mol_type = other DNA
ctccagccgaggccccacgg

SEQ ID NO: 1817 - DNA, 20 bp, synthetic construct
  source 1..20: mol_type = other DNA
cacccgtcactctccagccg

SEQ ID NO: 1818 - DNA, 20 bp, synthetic construct
  source 1..20: mol_type = other DNA
ccatcccctatatttatggc

SEQ ID NO: 1819 - DNA, 20 bp, synthetic construct
  source 1..20: mol_type = other DNA
aagcccatcccctatattta

SEQ ID NO: 1820 - DNA, 20 bp, synthetic construct
  source 1..20: mol_type = other DNA
actgctgcaccagattgagc

SEQ ID NO: 1821 - DNA, 20 bp, synthetic construct
  source 1..20: mol_type = other DNA
gcgacgagctccgtgaggcc

SEQ ID NO: 1822 - DNA, 20 bp, synthetic construct
  source 1..20: mol_type = other DNA
cctcagcgacgagctccgtg

SEQ ID NO: 1823 - DNA, 20 bp, synthetic construct
  source 1..20: mol_type = other DNA
gccagatgcacttcgtgcgc

SEQ ID NO: 1824 - DNA, 20 bp, synthetic construct
  source 1..20: mol_type = other DNA
tcatcctggacgtcttctgc

SEQ ID NO: 1825 - DNA, 20 bp, synthetic construct
  source 1..20: mol_type = other DNA
ctcatcctggacgtcttctg

SEQ ID NO: 1826 - DNA, 20 bp, synthetic construct
  source 1..20: mol_type = other DNA
cgcctatgagcgcctcatcc

SEQ ID NO: 1827 - DNA, 20 bp, synthetic construct
  source 1..20: mol_type = other DNA
gacctacggcaacagataca

SEQ ID NO: 1828 - DNA, 20 bp, synthetic construct
  source 1..20: mol_type = other DNA
tcggagctggacctgaccta

SEQ ID NO: 1829 - DNA, 20 bp, synthetic construct
  source 1..20: mol_type = other DNA
caaccccgaggagtcggagc

SEQ ID NO: 1830 - DNA, 20 bp, synthetic construct
  source 1..20: mol_type = other DNA
gttcttcaaccccgaggagt

SEQ ID NO: 1831 - DNA, 20 bp, synthetic construct
  source 1..20: mol_type = other DNA
gggcatgttcttcaaccccg

SEQ ID NO: 1832 - DNA, 20 bp, synthetic construct
  source 1..20: mol_type = other DNA
aagatgatgaccaagaagcc

SEQ ID NO: 1833 - DNA, 20 bp, synthetic construct
  source 1..20: mol_type = other DNA
caagatgatgaccaagaagc

SEQ ID NO: 1834 - DNA, 20 bp, synthetic construct
  source 1..20: mol_type = other DNA
gatccgcgtgcagcccaacg

SEQ ID NO: 1835 - DNA, 20 bp, synthetic construct
  source 1..20: mol_type = other DNA
gcagtgcaagcgcaacgagc

SEQ ID NO: 1836 - DNA, 20 bp, synthetic construct
  source 1..20: mol_type = other DNA
ctgcagttccatgatgtggc

SEQ ID NO: 1837 - DNA, 20 bp, synthetic construct
  source 1..20: mol_type = other DNA
gaggctgcagttccatgatg

SEQ ID NO: 1838 - DNA, 20 bp, synthetic construct
  source 1..20: mol_type = other DNA
acgagcgcaaggccgaggtg

SEQ ID NO: 1839 - DNA, 20 bp, synthetic construct
  source 1..20: mol_type = other DNA
cctgaacgagcgcaaggccg

SEQ ID NO: 1840 - DNA, 20 bp, synthetic construct
  source 1..20: mol_type = other DNA
caaggccctgaacgagcgca

SEQ ID NO: 1841 - DNA, 20 bp, synthetic construct
  source 1..20: mol_type = other DNA
cttcatcctgcgctgcggca

SEQ ID NO: 1842 - DNA, 20 bp, synthetic construct
  source 1..20: mol_type = other DNA
gtgcccttcatcctgcgctg

SEQ ID NO: 1843 - DNA, 20 bp, synthetic construct
  source 1..20: mol_type = other DNA
agaatgagaggtgggatggt

SEQ ID NO: 1844 - DNA, 20 bp, synthetic construct
  source 1..20: mol_type = other DNA
gtggagaatgagaggtggga

SEQ ID NO: 1845 - DNA, 20 bp, synthetic construct
  source 1..20: mol_type = other DNA
cttaatgaaaccataaaaat

SEQ ID NO: 1846 - DNA, 20 bp, synthetic construct
  source 1..20: mol_type = other DNA
gactaagcttaattgctttc

SEQ ID NO: 1847 - DNA, 20 bp, synthetic construct
  source 1..20: mol_type = other DNA
gcttaattgctttctggaac

SEQ ID NO: 1848 - DNA, 20 bp, synthetic construct
  source 1..20: mol_type = other DNA
tctggaacaggatctgaaac

SEQ ID NO: 1849 - DNA, 20 bp, synthetic construct
  source 1..20: mol_type = other DNA
ctgaaactggatatcccaac

SEQ ID NO: 1850 - DNA, 20 bp, synthetic construct
  source 1..20: mol_type = other DNA
ttaaaggtacgacaccacag

SEQ ID NO: 1851 - DNA, 20 bp, synthetic construct
  source 1..20: mol_type = other DNA
ttatttatacccatcaacac

SEQ ID NO: 1852 - DNA, 20 bp, synthetic construct
  source 1..20: mol_type = other DNA
atctccttgatcagctgaaa

SEQ ID NO: 1853 - DNA, 20 bp, synthetic construct
  source 1..20: mol_type = other DNA
caacaaagaagagacaattc

SEQ ID NO: 1854 - DNA, 20 bp, synthetic construct
  source 1..20: mol_type = other DNA
ttaggatgtggatgtagaag

SEQ ID NO: 1855 - DNA, 20 bp, synthetic construct
  source 1..20: mol_type = other DNA
ggatgtagaagaggcagttc

SEQ ID NO: 1856 - DNA, 20 bp, synthetic construct
  source 1..20: mol_type = other DNA
gatgtagaagaggcagttct

SEQ ID NO: 1857 - DNA, 20 bp, synthetic construct
  source 1..20: mol_type = other DNA
atgtagaagaggcagttctg

SEQ ID NO: 1858 - DNA, 20 bp, synthetic construct
  source 1..20: mol_type = other DNA
caagagccatctgtagatgc

SEQ ID NO: 1859 - DNA, 20 bp, synthetic construct
  source 1..20: mol_type = other DNA
gccatctgtagatgctggtg

SEQ ID NO: 1860 - DNA, 20 bp, synthetic construct
  source 1..20: mol_type = other DNA
ggtgtggattgttcatcaat

SEQ ID NO: 1861 - DNA, 20 bp, synthetic construct
  source 1..20: mol_type = other DNA
gtggattgttcatcaattgg

SEQ ID NO: 1862 - DNA, 20 bp, synthetic construct
  source 1..20: mol_type = other DNA
tggattgttcatcaattggc

SEQ ID NO: 1863 - DNA, 20 bp, synthetic construct
  source 1..20: mol_type = other DNA
ggattgttcatcaattggcg

SEQ ID NO: 1864 - DNA, 20 bp, synthetic construct
  source 1..20: mol_type = other DNA
tggcggggttccatttttcc

SEQ ID NO: 1865 - DNA, 20 bp, synthetic construct
  source 1..20: mol_type = other DNA
ccacagcataaaaaatcaca

SEQ ID NO: 1866 - DNA, 20 bp, synthetic construct
  source 1..20: mol_type = other DNA
ggaaaagacaaagaaaacag

SEQ ID NO: 1867 - DNA, 20 bp, synthetic construct
  source 1..20: mol_type = other DNA
aaacagaggcattaacacac

SEQ ID NO: 1868 - DNA, 20 bp, synthetic construct
  source 1..20: mol_type = other DNA
gaggcattaacacactggag

SEQ ID NO: 1869 - DNA, 20 bp, synthetic construct
  source 1..20: mol_type = other DNA
cacactggagaggtctaaag

SEQ ID NO: 1870 - DNA, 20 bp, synthetic construct
  source 1..20: mol_type = other DNA
ggaagaaactacagagcact

SEQ ID NO: 1871 - DNA, 20 bp, synthetic construct
  source 1..20: mol_type = other DNA
cttagtcaaaccaattttta

SEQ ID NO: 1872 - DNA, 20 bp, synthetic construct
  source 1..20: mol_type = other DNA
tctcttttaaagtacctgtt

SEQ ID NO: 1873 - DNA, 20 bp, synthetic construct
  source 1..20: mol_type = other DNA
ttctcttttaaagtacctgt

SEQ ID NO: 1874 - DNA, 20 bp, synthetic construct
  source 1..20: mol_type = other DNA
tataaataacttttcctctg

SEQ ID NO: 1875 - DNA, 20 bp, synthetic construct
  source 1..20: mol_type = other DNA
cagttcttaccagtgttgat

SEQ ID NO: 1876 - DNA, 20 bp, synthetic construct
  source 1..20: mol_type = other DNA
tcagttcttaccagtgttga

SEQ ID NO: 1877 - DNA, 20 bp, synthetic construct
  source 1..20: mol_type = other DNA
tgatcaaggagatgttcacg

SEQ ID NO: 1878 - DNA, 20 bp, synthetic construct
  source 1..20: mol_type = other DNA
gtttccttttcagctgatca

SEQ ID NO: 1879 - DNA, 20 bp, synthetic construct
  source 1..20: mol_type = other DNA
tttagcatcattaacagctc

SEQ ID NO: 1880 - DNA, 20 bp, synthetic construct
  source 1..20: mol_type = other DNA
acagatggctcttgacttag

SEQ ID NO: 1881 - DNA, 20 bp, synthetic construct
  source 1..20: mol_type = other DNA
tccacaccagcatctacaga

SEQ ID NO: 1882 - DNA, 20 bp, synthetic construct
  source 1..20: mol_type = other DNA
atatgacatacctggaaaaa

SEQ ID NO: 1883 - DNA, 20 bp, synthetic construct
  source 1..20: mol_type = other DNA
aggttgatctgggctcgcag

SEQ ID NO: 1884 - DNA, 20 bp, synthetic construct
  source 1..20: mol_type = other DNA
agtgaattaaaggttgatct

SEQ ID NO: 1885 - DNA, 20 bp, synthetic construct
  source 1..20: mol_type = other DNA
aagtgaattaaaggttgatc

SEQ ID NO: 1886-1999 - skipped (114 entries)

SEQ ID NO: 2000 - DNA, 21 bp, synthetic construct
  source 1..21: mol_type = other DNA
agtgggggtgaattcagtgta

SEQ ID NO: 2001 - DNA, 20 bp, synthetic construct
  source 1..20: mol_type = other DNA
tctgcagccttcccagagga

SEQ ID NO: 2002 - DNA, 21 bp, synthetic construct
  source 1..21: mol_type = other DNA
tgcccaacttctgctggcatc

SEQ ID NO: 2003 - DNA, 17 bp, synthetic construct
  source 1..17: mol_type = other DNA
aaataaaatacgaaatg

SEQ ID NO: 2004 - protein, 26 aa, synthetic construct
SGGGSGGGGSGGGGSGGGGSGGGSLQ

SEQ ID NO: 2005 - DNA, 132 bp, unidentified
  source 1..132: mol_type = unassigned DNA
tcaagctcatttcctggtatgtggctggggccagagactggctcttaaaaagtgcagggtctggcgccctctggtggctggctcagaaaaagggccctgacaactcttttcatcttctaggtatgacaacga

SEQ ID NO: 2006 - RNA, 5000 nt, synthetic construct
  source 1..5000: mol_type = other RNA
  misc_difference 1..5000: note = This sequence may encompass 50, 60, 70, 100, 200, 500, 1000, 2000, 3000, 4000, or 5000 nucleotides
aaaaaaaaaaaaaaaaaaaaaaaaaaaaaaaaaaaaaaaaaaaaaaaaaaaaaaaaaaaaaaaaaaaaaaaaaaaaaaaaaaaaaaaaaaaaaaaaaaaaaaaaaaaaaaaaaaaaaaaaaaaaaaaaaaaaaaaaaaaaaaaaaaaaaaaaaaaaaaaaaaaaaaaaaaaaaaaaaaaaaaaaaaaaaaaaaaaaaaaaaaaaaaaaaaaaaaaaaaaaaaaaaaaaaaaaaaaaaaaaaaaaaaaaaaaaaaaaaaaaaaaaaaaaaaaaaaaaaaaaaaaaaaaaaaaaaaaaaaaaaaaaaaaaaaaaaaaaaaaaaaaaaaaaaaaaaaaaaaaaaaaaaaaaaaaaaaaaaaaaaaaaaaaaaaaaaaaaaaaaaaaaaaaaaaaaaaaaaaaaaaaaaaaaaaaaaaaaaaaaaaaaaaaaaaaaaaaaaaaaaaaaaaaaaaaaaaaaaaaaaaaaaaaaaaaaaaaaaaaaaaaaaaaaaaaaaaaaaaaaaaaaaaaaaaaaaaaaaaaaaaaaaaaaaaaaaaaaaaaaaaaaaaaaaaaaaaaaaaaaaaaaaaaaaaaaaaaaaaaaaaaaaaaaaaaaaaaaaaaaaaaaaaaaaaaaaaaaaaaaaaaaaaaaaaaaaaaaaaaaaaaaaaaaaaaaaaaaaaaaaaaaaaaaaaaaaaaaaaaaaaaaaaaaaaaaaaaaaaaaaaaaaaaaaaaaaaaaaaaaaaaaaaaaaaaaaaaaaaaaaaaaaaaaaaaaaaaaaaaaaaaaaaaaaaaaaaaaaaaaaaaaaaaaaaaaaaaaaaaaaaaaaaaaaaaaaaaaaaaaaaaaaaaaaaaaaaaaaaaaaaaaaaaaaaaaaaaaaaaaaaaaaaaaaaaaaaaaaaaaaaaaaaaaaaaaaaaaaaaaaaaaaaaaaaaaaaaaaaaaaaaaaaaaaaaaaaaaaaaaaaaaaaaaaaaaaaaaaaaaaaaaaaaaaaaaaaaaaaaaaaaaaaaaaaaaaaaaaaaaaaaaaaaaaaaaaaaaaaaaaaaaaaaaaaaaaaaaaaaaaaaaaaaaaaaaaaaaaaaaaaaaaaaaaaaaaaaaaaaaaaaaaaaaaaaaaaaaaaaaaaaaaaaaaaaaaaaaaaaaaaaaaaaaaaaaaaaaaaaaaaaaaaaaaaaaaaaaaaaaaaaaaaaaaaaaaaaaaaaaaaaaaaaaaaaaaaaaaaaaaaaaaaaaaaaaaaaaaaaaaaaaaaaaaaaaaaaaaaaaaaaaaaaaaaaaaaaaaaaaaaaaaaaaaaaaaaaaaaaaaaaaaaaaaaaaaaaaaaaaaaaaaaaaaaaaaaaaaaaaaaaaaaaaaaaaaaaaaaaaaaaaaaaaaaaaaaaaaaaaaaaaaaaaaaaaaaaaaaaaaaaaaaaaaaaaaaaaaaaaaaaaaaaaaaaaaaaaaaaaaaaaaaaaaaaaaaaaaaaaaaaaaaaaaaaaaaaaaaaaaaaaaaaaaaaaaaaaaaaaaaaaaaaaaaaaaaaaaaaaaaaaaaaaaaaaaaaaaaaaaaaaaaaaaaaaaaaaaaaaaaaaaaaaaaaaaaaaaaaaaaaaaaaaaaaaaaaaaaaaaaaaaaaaaaaaaaaaaaaaaaaaaaaaaaaaaaaaaaaaaaaaaaaaaaaaaaaaaaaaaaaaaaaaaaaaaaaaaaaaaaaaaaaaaaaaaaaaaaaaaaaaaaaaaaaaaaaaaaaaaaaaaaaaaaaaaaaaaaaaaaaaaaaaaaaaaaaaaaaaaaaaaaaaaaaaaaaaaaaaaaaaaaaaaaaaaaaaaaaaaaaaaaaaaaaaaaaaaaaaaaaaaaaaaaaaaaaaaaaaaaaaaaaaaaaaaaaaaaaaaaaaaaaaaaaaaaaaaaaaaaaaaaaaaaaaaaaaaaaaaaaaaaaaaaaaaaaaaaaaaaaaaaaaaaaaaaaaaaaaaaaaaaaaaaaaaaaaaaaaaaaaaaaaaaaaaaaaaaaaaaaaaaaaaaaaaaaaaaaaaaaaaaaaaaaaaaaaaaaaaaaaaaaaaaaaaaaaaaaaaaaaaaaaaaaaaaaaaaaaaaaaaaaaaaaaaaaaaaaaaaaaaaaaaaaaaaaaaaaaaaaaaaaaaaaaaaaaaaaaaaaaaaaaaaaaaaaaaaaaaaaaaaaaaaaaaaaaaaaaaaaaaaaaaaaaaaaaaaaaaaaaaaaaaaaaaaaaaaaaaaaaaaaaaaaaaaaaaaaaaaaaaaaaaaaaaaaaaaaaaaaaaaaaaaaaaaaaaaaaaaaaaaaaaaaaaaaaaaaaaaaaaaaaaaaaaaaaaaaaaaaaaaaaaaaaaaaaaaaaaaaaaaaaaaaaaaaaaaaaaaaaaaaaaaaaaaaaaaaaaaaaaaaaaaaaaaaaaaaaaaaaaaaaaaaaaaaaaaaaaaaaaaaaaaaaaaaaaaaaaaaaaaaaaaaaaaaaaaaaaaaaaaaaaaaaaaaaaaaaaaaaaaaaaaaaaaaaaaaaaaaaaaaaaaaaaaaaaaaaaaaaaaaaaaaaaaaaaaaaaaaaaaaaaaaaaaaaaaaaaaaaaaaaaaaaaaaaaaaaaaaaaaaaaaaaaaaaaaaaaaaaaaaaaaaaaaaaaaaaaaaaaaaaaaaaaaaaaaaaaaaaaaaaaaaaaaaaaaaaaaaaaaaaaaaaaaaaaaaaaaaaaaaaaaaaaaaaaaaaaaaaaaaaaaaaaaaaaaaaaaaaaaaaaaaaaaaaaaaaaaaaaaaaaaaaaaaaaaaaaaaaaaaaaaaaaaaaaaaaaaaaaaaaaaaaaaaaaaaaaaaaaaaaaaaaaaaaaaaaaaaaaaaaaaaaaaaaaaaaaaaaaaaaaaaaaaaaaaaaaaaaaaaaaaaaaaaaaaaaaaaaaaaaaaaaaaaaaaaaaaaaaaaaaaaaaaaaaaaaaaaaaaaaaaaaaaaaaaaaaaaaaaaaaaaaaaaaaaaaaaaaaaaaaaaaaaaaaaaaaaaaaaaaaaaaaaaaaaaaaaaaaaaaaaaaaaaaaaaaaaaaaaaaaaaaaaaaaaaaaaaaaaaaaaaaaaaaaaaaaaaaaaaaaaaaaaaaaaaaaaaaaaaaaaaaaaaaaaaaaaaaaaaaaaaaaaaaaaaaaaaaaaaaaaaaaaaaaaaaaaaaaaaaaaaaaaaaaaaaaaaaaaaaaaaaaaaaaaaaaaaaaaaaaaaaaaaaaaaaaaaaaaaaaaaaaaaaaaaaaaaaaaaaaaaaaaaaaaaaaaaaaaaaaaaaaaaaaaaaaaaaaaaaaaaaaaaaaaaaaaaaaaaaaaaaaaaaaaaaaaaaaaaaaaaaaaaaaaaaaaaaaaaaaaaaaaaaaaaaaaaaaaaaaaaaaaaaaaaaaaaaaaaaaaaaaaaaaaaaaaaaaaaaaaaaaaaaaaaaaaaaaaaaaaaaaaaaaaaaaaaaaaaaaaaaaaaaaaaaaaaaaaaaaaaaaaaaaaaaaaaaaaaaaaaaaaaaaaaaaaaaaaaaaaaaaaaaaaaaaaaaaaaaaaaaaaaaaaaaaaaaaaaaaaaaaaaaaaaaaaaaaaaaaaaaaaaaaaaaaaaaaaaaaaaaaaaaaaaaaaaaaaaaaaaaaaaaaaaaaaaaaaaaaaaaaaaaaaaaaaaaaaaaaaaaaaaaaaaaaaaaaaaaaaaaaaaaaaaaaaaaaaaaaaaaaaaaaaaaaaaaaaaaaaaaaaaaaaaaaaaaaaaaaaaaaaaaaaaaaaaaaaaaaaaaaaaaaaaaaaaaaaaaaaaaaaaaaaaaaaaaaaaaaaaaaaaaaaaaaaaaaaaaaaaaaaaaaaaaaaaaaaaaaaaaaaaaaaaaaaaaaaaaaaaaaaaaaaaaaaaaaaaaaaaaaaaaaaaaaaaaaaaaaaaaaaaaaaaaaaaaaaaaaaaaaaaaaaaaaaaaaaaaaaaaaaaaaaaaaaaaaaaaaaaaaaaaaaaaaaaaaaaaaaaaaaaaaaaaaaaaaaaaaaaaaaaaaaaaaaaaaaaaaaaaaaaaaaaaaaaaaaaaaaaaaaaaaaaaaaaaaaaaaaaaaaaaaaaaaaaaaaaaaaaaaaaaaaaaaaaaaaaaaaaaaaaaaaaaaaaaaaaaaaaaaaaaaaaaaaaaaaaaaaaaaaaaaaaaaaaaaaaaaaaaaaaaaaaaaaaaaaaaaaaaaaaaaaaaaaaaaaaaaaaaaaaaaaaaaaaaaaaaaaaaaaaaaaaaaaaaaaaaaaaaaaaaaaaaaaaaaaaaaaaaaaaaaaaaaaaaaaaaaaaaaaaaaaaaaaaaaaaaaaaaaaaaaaaaaaaaaaaaaaaaaaaaaaaaaaaaaaaaaaaaaaaaaaaaaaaaaaaaaaaaaaaaaaaaaaaaaaaaaaaaaaaaaaaaaaaaaaaaaaaaaaaaaaaaaaaaaaaaaaaaaaaaaaaaaaaaaaaaaaaaaaaaaaaaaaaaaaaaaaaaaaaaaaaaaaaaaaaaaaaaaaaaaaaaaaaaaaaaaaaaaaaaaaaaaaaaaaaaaaaaaaaaaaaaaaaaaaaaaaaaaaaaaaaaaaaaaaaaaaaaaaaaaaaaaaaaaaaaaaaaaaaaaaaaaaaaaaaaaaaaaaaaaaaaaaaaaaaaaaaaaaaaaaaaaaaaaaaaaaaaaaaaaaaaaaaaaaaaaaaaaaaaaaaaaaaaaaaaaaaaaaaaaaaaaaaaaaaaaaaaaaaaaaaaaaaaaaaaaaaaaaaaaaaaaaaaaaaaaaaaaaaaaaaaaaaaaaaaaaaaaaaaaaaaaaaaaaaaaaaaaaaaaaaaaaaaaaaaaaaaaaaaaaaaaaaaaaaaaaaaaaaaaaaaaaaaaaaaaaaaaaaaaaaaaaaaaaaaaaaaaaaaaaaaaaaaaaaaaaaaaaaaaaaaaaaaaaaaaaaaaaaaaaaaaaaaaaaaaaaaaaaaaaaaaaaaaaaaaaaaaaaaaaaaaaaaaaaaaaaaaaaaaaaaaaaaaaaaaaaaaaaaaaaaaaaaaaaaaaaaaaaaaaaaaaaaaaaaaaaaaaaaaaaaaaaaaaaaaaaaaaaaaaaaaaaaaaaaaaaaaaaaaaaa

SEQ ID NO: 2007 - RNA, 41 nt, synthetic construct
  source 1..41: mol_type = other RNA
  misc_difference 21: note = a, c, g, or t
  misc_difference 22: note = a, c, g, or t
  misc_difference 23: note = a, c, g, or t
  misc_difference 24: note = a, c, g, or t
  misc_difference 25: note = a, c, g, or t
  misc_difference 26: note = a, c, g, or t
  misc_difference 27: note = a, c, g, or t
  misc_difference 28: note = a, c, g, or t
  misc_difference 29: note = a, c, g, or t
  misc_difference 30: note = a, c, g, or t
  misc_difference 31: note = a, c, g, or t
  misc_difference 32: note = a, c, g, or t
  misc_difference 33: note = a, c, g, or t
  misc_difference 34: note = a, c, g, or t
  misc_difference 35: note = a, c, g, or t
  misc_difference 36: note = a, c, g, or t
  misc_difference 37: note = a, c, g, or t
  misc_difference 38: note = a, c, g, or t
  misc_difference 39: note = a, c, g, or t
  misc_difference 40: note = a, c, g, or t
  misc_difference 41: note = a, c, g, or t
taatttctactcttgtagatnnnnnnnnnnnnnnnnnnnnn
